(19) United States
(12) Patent Application Publication
(10) Pub. No.: US 2004/0005547 A1
(43) Pub. Date: Jan. 8, 2004

(54) Biomarkers and expression profiles for toxicology

(76) Inventors: Franziska Boess, Riehen (CH); Laura Suter-Dick, Bottmingen (CH); Detlef Wolf, Grenzach-Wyhlen (DE)

Correspondence Address: HOFFMANN-LA ROCHE INC., PATENT LAW DEPARTMENT, 340 KINGSLAND STREET, NUTLEY, NJ, 07110

(21) Appl. No.: 10/388,934

(22) Filed: Mar. 14, 2003

(30) Foreign Application Priority Data
Mar. 14, 2002 (EP) 02005336.9
Jul. 17, 2002 (EP) 02015657.6

(51) Int. Cl. C12Q 1/70; C12Q 1/68; G01N 33/53; G01N 33/567

(52) U.S. Cl. 435/5; 435/7.2; 435/6

(57) ABSTRACT

The present invention is based on the determination of the global changes in gene expression in tissues or cells exposed to known toxins, in particular hepatotoxins, as compared to unexposed tissues or cells as well as the identification of individual genes that are differentially expressed upon toxin exposure. The invention includes methods of predicting at least one toxic effect of a compound, predicting the progression of a toxic effect of a compound, and predicting the hepatoxicity of a compound. Also provided are methods of predicting the mechanism of toxicity of a compound. In a further aspect, the invention provides probes comprising sequences that specifically hybridize to genes in Table 3 as well as solid supports comprising at least two of the said probes.

### BACKGROUND OF THE INVENTION

[0001] The present invention relates to toxicogenomic methods useful in the development of safe drugs. More specifically, the present invention relates to methods for the prediction of a toxic effect, especially hepatotoxicity, in animal models or cell cultures. Furthermore, expression profiles characteristic of different mechanisms of hepatoxicity as well as specific markers for hepatoxicity are provided.

[0002] The gene expression pattern governs cellular development and physiology, and is affected by pathological situations, including disease and the response to a toxic insult. Bearing this in mind, it becomes clear that the study of gene and protein expression in preclinical safety experiments will help toxicologists to better understand the effects of chemical exposure on mammalian physiology. On the one hand, the identification of a certain number of modulated genes and/or proteins after exposure to a toxicant will lead to the identification of novel predictive and more sensitive biomarkers which might replace the ones currently used. The knowledge regarding marker genes for particular mechanisms of toxicity, together with the rapidly growing understanding of the structure of the human genome will form the basis for the identification of new biomarkers. These markers may allow the prediction of toxic liabilities, the differentiation of species-specific responses and the identification of responder and non-responder populations. Gene expression analysis is an extremely powerful tool for the detection of new, specific and sensitive markers for given mechanisms of toxicity (Fielden, M. R., and Zacharewski, T. R. (2001). Challenges and limitations of gene expression profiling in mechanistic and predictive toxicology. Toxicol Sci 60, 6-10). These markers should provide additional endpoints for inclusion into early animal studies, thus minimising the time, the cost and the number of animals needed to identify the toxic potential of a compound in development. Also, this will lead to the development of relevant screening assays in vivo and/or in vitro. The understanding of the molecular mechanisms underlying toxicity will also provide more insight into species-specific response to drugs and should immensely increase the predictability of potential risk accumulation for drug-combinations or drug-disease interactions. Moreover, chemically induced changes in gene expression are likely to occur at exposures to chemicals below those that induce an adverse toxicological outcome. As drug-induced liver toxicity is a major issue for health care and drug development, great interest lies in hepatotoxins. Currently, the predictivity of gene and protein expression for toxicity is a generally accepted assumption supported by some published results, but substantially more data are needed to prove the validity of this hypothesis (Waring, J. F., Ciurlionis, R., Jolly, R. A., Heindel, M., and Ulrich, R. G. (2001). Microarray analysis of hepatotoxins in vitro reveals a correlation between gene expression profiles and mechanisms of toxicity. Toxicol Lett 120, 359-68; Bulera, S. J., Eddy, S. M., Ferguson, E., Jatkoe, T. A., Reindel, J. F., Bleavins, M. R., and De La Iglesia, F. A. (2001). RNA expression in the early characterization of hepatotoxicants in Wistar rats by high-density DNA microarrays. Hepatology 33, 1239-58; Bartosiewicz M. J., Jenkins, D., Penn, S., Emery, J., and Buckpitt, A. (2001). Unique gene expression patterns in liver and kidney associated with exposure to chemical toxicants. J Pharmnacol Exp Ther 297, 895-905). A widespread approach to validate these new tools is the use of model compounds in animal models to produce expression profiles which are expected to be characteristic for the compound under examination. Model compounds that have been used for gene expression profiling in the liver include WY-14,643, phentobarbital, clofibrate, ethanol and acetaminophen. The majority of the published results confirm the regulation of genes previously identified and add a large number of genes modulated by the test compound. Thus microarrays showed the induction of cytochromes (CYP2B and CYP3A) as well as of genes related to apoptosis and DNA-repair by phentobarbital (Carver, M. P., and Clancy, B. (2000). Transcriptional profiling of phenobarbital (PB) hepatotoxicity in the mouse. Toxicological Sciences 54, 383). Similarly, studies on the peroxisome proliferator WY-14,643 showed the induction of CYP4A, GST and acyl-CoA hydroxylase, as well as of genes associated with oxidative damage, with cell proliferation and with apoptosis (Carfagna, M. A., Baker, T. K., Wilding, L. A., Neeb, L. A., Torres, S., Ryan, T. P., and Gelbert, L. M. (2000). Effects of a peroxisome proliferator (WY-14,643) on hepatocyte transcription using microarray technology. Toxicological Sciences 54, 383). Ruepp and co-workers investigated gene expression changes after treating mice with acetaminophen, and found that genes such as metallothioneins, c-fos, glutathione peroxidase and proteasome-related-genes were induced (Ruepp, S., Tonge, R. P., Wallis, N. T., Davison, M. D., Orton, T. C., and Pognan, F. (2000). Genomic and proteomic investigations of acetaminophen (APAP) toxicity in mouse liver in vivo. Toxicological Sciences 54, 384). Similar results were also presented by Suter et al. (Suter, L., Boelsterli, U. A., Winter, M., Crameri, F., Gasser, R., Bedoucha, M., deVera, C., and Albertini, S. (2000). Toxicogenomics: Correlation of acetaminophen-induced hepatotoxicity with gene expression using DNA microarrays. Toxicological Sciences 54, 383) and by Reilly et al. (Reilly, T. P., Bourdi, M., Brady, J. N., Pise-Masison, C. A., Radonovich, M. F., George, J. W., and Pohl, L. R. (2001). Expression profiling of acetaminophen liver toxicity in mice using microarray technology. Biochem Biophys Res Commun 282, 321-8). So far, expression profiles and toxicity markers were only provided for specific model compounds in the prior art. Therefore) the technical problem underlying the present invention was to provide for gene expression profiles and toxicity markers, which are characteristic not only for a specific toxic compound, but for a specific mechanism of toxicity and which are reproducible.

[0003] As can be seen, there is a need for methods for the prediction of toxic effects of a compound, for the prediction of the mechanism of toxicity of a compound, especially for the prediction of hepatotoxicity, by using reproducible gene expression profiles caused by known toxic compounds) gene expression profiles characteristic of a mechanism of hepatoxicity, and specific marker genes.

### SUMMARY OF THE INVENTION

[0004] The present invention is based on the determination of the global changes in gene expression in tissues or cells exposed to known toxins, in particular hepatotoxins, as compared to unexposed tissues or cells as well as the identification of individual genes that are differentially expressed upon toxin exposure.

[0005] The invention includes methods of predicting at least one toxic effect of a compound, predicting the progression of a toxic effect of a compound, and predicting the hepatoxicity of a compound. Also provided are methods of predicting the mechanism of toxicity of a compound. In a further aspect, the invention provides probes comprising sequences that specifically hybridize to genes in Table 3 as well as solid supports comprising at least two of the said probes, and primers for specific amplification of the genes of Table 3. The prediction of toxic effects comprises the steps of a) generating a database with the expression of marker genes elicited by known toxic compounds in animal models or cell culture systems, b) obtaining a biological sample from the model systems; c) obtaining a gene expression profile characteristic of a given toxicity mechanism and/or detecting and/or measuring the expression of (a) specific marker gene(s) d) comparing the expression profile and/or expression of specific marker gene(s) with the database of step a).

[0006] More specifically, in one aspect of the present invention, a method of predicting at least one toxic effect of a compound, comprises detecting the level of expression of one or more genes from Table 3 in a tissue or cell sample exposed to the compound; wherein differential expression of the one or more genes from Table 3 is indicative of at least one toxic effect.

[0007] In another aspect of the present invention, a method of predicting at least one toxic effect of a compound comprises (a) detecting the level of expression of one or more genes from Table 3 in a tissue or cell sample exposed to the compound; and (b) comparing the level of expression of the one or more genes to their level of expression in a control tissue or cell sample, wherein differential expression of the one or more genes in Table 3 is indicative of at least one toxic effect.

[0008] In yet another aspect of the present invention, a method of predicting the progression of a toxic effect of a compound comprises detecting the level of expression in a tissue or cell sample exposed to the compound of one or more genes from Table 3, wherein differential expression of the one or more genes in Table 3 is indicative of toxicity progression.

[0009] In a further aspect of the present invention, a method of predicting the mechanism of toxicity of a compound comprises detecting the level of expression in a tissue or cell sample exposed to the compound of one or more genes from Table 3, wherein differential expression of the one or more genes in Table 3 is associated with a specific mechanism of toxicity.

[0010] In still a further aspect of the present invention, a method of predicting at least one toxic effect of a compound comprises detecting the level of expression of one of the genes selected from Table 4 in a tissue or cell sample exposed to the compound, wherein differential expression of the gene selected from Table 4 is indicative of at least one toxic effect.

[0011] In still a further aspect of the present invention, a set of nucleic acid primers have primers that specifically amplify at least two of the genes from Table 3.

[0012] In still a further aspect of the present invention, a set of nucleic acid probes have probes that comprise sequences which hybridize to at least a specific number of the genes from Table 3. While not being limited thereto, the specific number of genes may be at least 2 genes from Table 3, at least 5 genes from Table 3, and at least 10 genes from Table 3.

[0013] In still a further aspect of the present invention, a solid support comprises at least two probes, wherein each of the probes comprises a sequence that specifically hybridizes to a gene in Table 3.

[0014] In still a further aspect of the present invention, a computer system comprises a database containing DNA sequence information and expression information of at least two of the genes from Table 3 from tissue or cells exposed to a hepatotoxin, and a user interface.

[0015] In still a further aspect of the present invention, a computer system for predicting at least one toxic effect of a compound comprises a processor and a memory coupled to the processor; wherein the memory stores a first set of data including the level of expression of one or more genes from Table 3 in a tissue or cell sample exposed to the compound, and the memory stores a second set of data including the level of expression of the one or more genes from Table 3 in a control tissue or cell sample; and the processor compares the first set of data with the second set of data to predict the at least one toxic effect of the compound.

[0016] In yet a further aspect of the present invention, a kit comprises 1) at least one solid support having at least two probes, wherein each of the probes comprises a sequence that specifically hybridizes to a gene in Table 3, and 2)gene expression information for the said genes.

[0017] These and other features, aspects and advantages of the present invention will become better understood with reference to the following drawings, description and claims.

### BRIEF DESCRIPTION OF THE DRAWINGS

[0018] FIG. 1: Effect of CCl4 on PEG-3 (progression elevated gene-3) expression and circulating ALT (alanine aminotransferase) levels. Expression levels are expressed in arbitrary units. Circulating ALT-levels are expressed in μkat/ml. For each dose group (Control, Low dose=0.25 ml/kg and High dose=2 ml/kg) the values obtained for each of the 5 animals are represented.

[0019] FIG. 2: Effect of HDZ on PEG-3 expression. The median expression level of the gene PEG-3 for 10 control animals, 10 low-dose animals (10 mg/kg) and 10 high dose animals (60 mg/kg) are represented. Expression levels are expressed in arbitrary units. An expression of below 100 is considered as non-detectable.

[0020] FIG. 3: Effect of NFT on PEG-3 expression and on circulating ALT (alanine aminotransferase) levels. The median expression level of the gene PEG-3 for 10 control animals, 10 low-dose animals (5 mg/kg), 10 mid-dose animals (20 mg/kg) and 10 high dose animals (60 mg/kg) are represented. Expression levels are expressed in arbitrary units. An expression of below 100 is considered non-detectable

[0021] FIG. 4: Effect of Thioacetamide and Thioacetamide-S-oxide on PEG-3 expression at 3 different time points by in vitro exposure of hepatocytes. Rat primary hepatocytes (in monolayer cultures) were exposed to 0, 30, 100 and 300 μM Thioacetamide-S-Oxide and to 3 and 10 mM Thioacetamide. Expression level of PEG-3 were at 2, 6 and 24 hs after exposure. For each dose and time point triplicate samples were analyzed. The expression level of PEG-3 in each experimental condition is displayed in FIG. 4A through C, where each line represents the expression level for each replicate. Expression levels are expressed in arbitrary units. In addition, cytotoxicity (LDH-release) of Thioacetamide-S-oxide at several doses and time points is represented in FIG. 4D.

[0022] FIG. 5: Effect of in vitro exposure of hepatocytes to Thioacetamide (TAA) and Thioacetamide-S-oxide (TSO) on the expression levels of PEG-3 and on some co-regulated genes as determined by cluster analysis. Rat primary hepatocytes (in monolayer cultures) were exposed to 0, 30, 100 and 300 1M Thioacetamide-S-Oxide and to 3 and 10 mM Thioacetamide and analyzed at 3 different time points. Each line represents a single gene; the intensity of the grey colour is proportional to the expression level.

[0023] FIG. 6: Effect of in vitro exposure to Glucokinase activators on the expression levels of PEG-3, GADD-45 and GADD-153 and on mitochondrial beta-oxidation. FIG. 6A represents the induction of PEG-3, GADD-45 and GADD-153 with increasing doses of Ro 28-2310 at 6 hours. FIG. 6B shows the inhibition of beta-oxidation by 3 glucokinase activators.

[0024] FIG. 7: Recursive Feature Elimination (RFE) for generation of support vector machines (SVMs) for the direct acting group (see Example 9).

[0025] FIG. 8: Classification of Amineptine as a steatotic compound. The bigger a positive discriminant value is, the better is the data fit into a specific class defined by the respective SVM. A negative discriminant value means that data do not fit into a compound class.

[0026] FIG. 9: Classification of 1,2-Dichlorobenzene as a direct acting compound. The bigger a positive discriminant value is, the better is the data fit into a specific class defined by the respective SVM. A negative discriminant value means that data do not fit into a compound class.

[0027] FIG. 10: Differentiation of toxic and non-toxic compounds using RT-PCR

[0028] FIG. 11: Western-Blots of liver extracts with antibody specific for CYP2B. Two representative animals from each treatment group were analyzed. a: lane 1: MW-markers; lanes 2 and 3: control (6H); lanes 4 and 5: Ro 65-7199 (6H); lanes 6 and 7: Ro 66-0074 (6H); lanes 8 and 9: controls (24H); lanes 10 and 11: Ro 65-7199 (24H); lanes 12 and 13: Ro 66-0074 (24H). b: lane 1: MW-markers; lanes 2 and 3: controls (7 Days); lanes 4 and 5 30 mg/kg/d Ro 65-7199 (7 Days); lanes 6 and 7:100 mg/kg/d Ro 65-7199 (7 Days); lanes 8 and 9: 400 mg/kg/d Ro 65-7199 (7 Days); lane 11: Positive control (phenobarbital induced rat microsomal extract). Inlet bargraphs represent the densitometric quantification of each gel.

[0029] In the present invention it was found that marker genes are differentially expressed in tissues obtained after exposure of non-human animals, e.g. rats, to model toxic compounds at doses and/or time points in which these compounds did not elicit the conventionally measured response of elevation in plasma liver enzymes. It was also observed that this elevation of particular marker genes was evident not only after in vivo exposure of the test animals but also in vitro in primary hepatic cell cultures exposed to a similar group of hepatotoxins. Furthermore, the regulation of a group of genes by several compounds with a similar mechanism of toxicity provides a characteristic gene expression profile or “fingerprint” for said mechanism of toxicity.

[0030] In the present study, compounds with well characterized toxicity as Chlorpromazine, Cyclosporine A, Erythromycin, Glibenclamide, Lithocholic acid, Ro 48-5695 (Endothelin receptor antagonist), Dexamethasone, 1,2-Dichlorobenzene, Aflatoxin B1, Bromobenzene, Carbon tetrachloride, Diclofenac, Hydrazine, Nitrofurantoin, Thioacetamide, Concanavaline A, Tacrine, Tempium (Lazabemide), Tolcapone (Tasmar), 1,4-Dichlorobenzene, Amineptin, Amiodarone, Doxycycline, Ro 28-1674 (glucokinase activator), Ro 28-1675 (glucokinase activator), Ro 65-7199 (5-HT6 receptor antagonist), Tetracycline, Dinitrophenol, Cyproterone Acetate, Phenobarbital, Clofibrate, Acetaminophen, Thioacetamide-S-Oxide, Perhexiline, Methapyrilene were selected as known hepatotoxins. These compounds are widely known to cause hepatic injury in animals and/or in man, as described in “Toxicology of the liver, 2^{nd}. Ed, Ed. By G. L. Plaa and W. R. Hewitt, Target organ toxicology series, 1997. A brief summary of the known effects of these compounds is listed below.

[0031] Carbon tetrachloride (CCl4), bromobenzene and 1,2-dichlorobenzene are halogenated, highly reactive compounds leading to toxicity in the liver in rodents and in man (Brondeau MT, Bonnet P, Guenier JP, De Ceaurriz J. (1983). Short-term inhalation test for evaluating industrial hepatotoxicants in rats. Toxicol Lett. 19, 139-46; Rikans, L. E. (1989). Influence of aging on chemically induced hepatotoxicity: role of age-related changes in metabolism. Drug Metab Rev 20, 87-110). For CC14, several studies have shown that the toxicity is mediated by its metabolic product, the highly reactive trichloromethyl free radical (Stoyanovsky, D. A., and Cederbaum, A. I. (1999). Metabolism of carbon tetrachloride to trichloromethyl radical: An ESR and HPLC-EC study. Chem Res Toxicol 12, 730-6). This radical leads to lipid peroxidation and can react with cellular proteins and with DNA (Castro, G. D., Diaz Gomez, M. I., and Castro, J. A. (1997). DNA bases attack by reactive metabolites produced during carbon tetrachloride biotransformation and promotion of liver microsomal lipid peroxidation. Res Commun Mol Pathol Pharmacol 95, 253-8). Secondary liver injury following the administration of these halogenated compounds is believed to be caused by inflammatory processes originating from products of activated Kupffer cells (Edwards, M. J., Keller, B. J., Kauffman, F. C., and Thurman, R. G. (1993). The involvement of Kupffer cells in carbon tetrachloride toxicity. Toxicol Appl Pharmacol 119, 275-9). Thus, the observed toxicity is due to direct action of the free radicals and to indirect action mediated by cytokines such as TNF alpha (DeCicco, L. A., Rikans, L. E., Tutor, C. G., and Hornbrook, K. R. (1998). Typical lesions produced by these compounds a few hours after a single administration are centrilobular cell degeneration and necrosis accompanied by lipid peroxidation, followed by hepatic regeneration starting 48 hours after administration. Elevation of serum enzyme activities is seen as a result of of the hepatocellular necrosis (e.g. AST, ALT, SDH).

[0032] Hydrazine and hydrazine derivatives are among the early drugs reported to cause damage to the liver. Thioacetamide and its metabolite Thioacetamide-S-oxide are also known to cause liver injury, histopathological examination showed necrotic hepatocytes around the central vein with infiltration of macrophages, neutrophils and eosinophils. Thus biochemical and histologic and clinical features indicate hepatocellular injury, with parenchimal degeneration and necrosis (Dashti, Jeppsson, Hagerstrand, Hultberg, Srinivas, Abdulla, Joelsson and Bengmark (1987). Early biochemical and histological changes in rats exposed to a single injection of thioacetamide. Pharmacol Toxicol 3, 171-4.; Albano, Goria-Gatti, Clot, Jannone and Tomasi (1993). Possible role of free radical intermediates in hepatotoxicity of hydrazine derivatives. Toxicol Ind Health 3, 529-38.).

[0033] Cyclosporine A (CsA) is an immunosupressant that has been reported to induce cholestasis in transplanted patients. Several mechanisms have been proposed to explain this toxic manifestation: hepatotoxicity, competition for bilirary excretion, inhibition of bilirubin excretion, inhibition of the synthesis of bile acids, etc. (Le Thai, Dumont, Michel, Erlinger and Houssin (1988). Cholestatic effect of cyclosporine in the rat. An inhibition of bile acid secretion. Transplantation 4, 510-2.). In spite of the liver being one of the main target organs for CsA-induced toxicity, the kidney is also a target organ for toxicity. Nevertheless, nephrotoxicity seems to be the consequence of chronic exposure to the drug. Using animal studies (rats), it has been shown that the bile flow is significantly reduced after chronic (3 weeks) or acute (single dose) administration of CsA. This decrease in BA-flow is reflected by an increase in plasma bile acids and plasma bilirubin. No histopathological findings accompany this effect (Stone, Warty, Dindzans and Van Thiel (1988). The mechanism of cyclosporine-induced cholestasis in the rat. Transplant Proc 3 Suppl 3, 841-4, Roman, Monte, Esteller and Jimenez (1989). Cholestasis in the rat by means of intravenous administration of cyclosporine vehicle, Cremophor EL. Transplantation 4, 554-8).

[0034] Tacrine is a compound for the treatment of Alzheimer's disease in man. In treated patients, it shows hepatotoxicity with an incidence of 40-50%. In rodents, tacrine elicited hepatic toxicity manifested as pericentral necrosis and fatty changes, accompanied by an increase in circulating liver enzymes (Monteith and Theiss (1996). Comparison of tacrine-induced cytotoxicity in primary cultures of rat, mouse, monkey, dog, rabbit, and human hepatocytes. Drug Chem Toxicol 1-2, 59-70; Stachlewitz, Arteel, Raleigh, Connor, Mason and Thurman (1997). Development and characterization of a new model of tacrine-induced hepatotoxicity: role of the sympathetic nervous system and hypoxia-reoxygenation. J Pharmacol Exp Ther 3, 1591-9).

[0035] Concanavaline A is a model compound used for studying the role of liver-associated T cells in acute hepatitis produced in rats. Concanavalin A produces a severe hepatitis, which can be assessed by serum biochemistry showing increased interleukines (IL-6 and TNF-alpha), as well as alanine aminotransferase (ALT) (Mizuhara, O'Neill, Seki, Ogawa, Kusunoki, Otsuka, Satoh, Niwa, Senoh and Fujiwara (1994). T cell activation-associated hepatic injury: mediation by tumor necrosis factors and protection by interleukin 6. J Exp Med 5, 1529-37).

[0036] Chlorpromazine has a clear and well-studied profile of producing liver injury in man. It is the most extensively studied neuroleptic and the hepytic injury that produces is hepatocanalicular cholestasis. Up to 1% of the treated patients develop jaundice. Some studies have shown that chlorpromazine inhibits Na+-K+-ATPase cation pumping in intact cells, therefore contributing to the chlorpromazine-induced cholestasis in animals and humans. (Van Dyke and Scharschmidt (1987). Effects of chlorpromazine on Na+-K+-ATPase pumping and solute transport in rat hepatocytes. Am J Physiol 5 Pt 1, G613-21.). Lithocholic acid is one of the bile acids transported into the bile canaliculi. An increase in the concentration of lithocholic acid causes intrahepatic cholestasis (Shefer, Zaki and Salen (1983). Early morphologic and enzymatic changes in livers of rats treated with chenodeoxycholic and ursodeoxycholic acids. Hepatology 2, 201-8).

[0037] Erythromycine have been incriminated as the cause of cholestatic liver injury. The pattern of injury is usually hepatocanalicular cholestasis. In rare casis, erythromycin can also lead to liver necrosis.(Gaeta, Utili, Adinolfi, Abernathy and Giusti (1985). Characterization of the effects of erythromycin estolate and erythromycin base on the excretory function of the isolated rat liver. Toxicol Appl Pharmacol 2, 185-92.). Glibenclamide has been associated with reversible cholestasis in clinical case studies (Del-Val, Garrigues, Ponce and Benages (1991). Glibenclamide-induced cholestasis. J Hepatol 3, 375).

[0038] Dinitrophenol is a widely used model compound for mitochondrial uncoupling. Dosing of animals with this compound leads to increased mitochondrial respiration, decreased ATP-levels and increase in body temperature (Okuda, Lee, Kumar and Chance (1992). Comparison of the effect of a mitochondrial uncoupler, 2,4-dinitrophenol and adrenaline on oxygen radical production in the isolated perfused rat liver. Acta Physiol Scand 2, 159-68).

[0039] Dexamethasone is a known glucocorticoid which is used in many experimental models to induce the activity of cytochromes P450 in the liver and in hepatocyte cultures (Kocarek and Reddy (1998). Negative regulation by dexamethasone of fluvastatin-inducible CYP2B expression in primary cultures of rat hepatocytes: role of CYP3A. Biochem Pharmacol 9, 1435-43). Other drugs that are usually related with hepatomegaly and/or peroxisome proliferation and are known inducers of some cytochromes P450 in the liver and in hepatocyte cell cultures are phenobarbital, cyproterone acetate and fibrates such as clofibrate (Menegazzi, Carcereri-De Prati, Suzuki, Shinozuka, Pibiri, Piga, Columbano and Ledda-Columbano (1997). Liver cell proliferation induced by nafenopin and cyproterone acetate is not associated with increases in activation of transcription factors NF-kappaB and AP-1 or with expression of tumor necrosis factor alpha. Hepatology 3, 585-92.; Kietzmann, Hirsch-Ernst, Kahl and Jungermann (1999). Mimicry in primary rat hepatocyte cultures of the in vivo perivenous induction by phenobarbital of cytochrome P-450 2B1 mRNA: role of epidermal growth factor and perivenous oxygen tension. Mol Pharmacol 1, 46-53; Diez-Fernandez, Sanz, Alvarez, Wolf and Cascales (1998). The effect of non-genotoxic carcinogens, phenobarbital and clofibrate, on the relationship between reactive oxygen species, antioxidant enzyme expression and apoptosis. Carcinogenesis 10, 1715-22).

[0040] Acetaminophen is a widely used analgesic and antipyretic drug that causes acute liver damage upon overdosis. This drug is often missused for suicidal purposses. If overdosed, the hepatic glutathione pool becomes depleted and the metabolic activation of the compound leads to a highly reactive metabolite. This metabolite can bind to DNA and proteins in the cell, leading to hepatocellular necrosis (Tarloff, Khairallah, Cohen and Goldstein (1996). Sex- and age-dependent acetaminophen hepato- and nephrotoxicity in Sprague-Dawley rats: role of tissue accumulation, nonprotein sulffiydryl depletion, and covalent binding. Ftindanm Appl Toxicol 1, 13-22; Cohen and Khairallah (1997). Selective protein arylation and acetaminophen-induced hepatotoxicity. Drug Metab Rev 1-2, 59-77; Fountoulakis, Berndt, Boelsterli, Crameri, Winter, Albertini and Suter (2000). Two-dimensional database of mouse liver proteins: changes in hepatic protein levels following treatment with acetaminophen or its nontoxic regioisomer 3-acetamidophenol. Electrophoresis 11, 2148-61).

[0041] Methapyrilene is an antihistamin drug that causes acute periportal hepatotoxicity in rats, but also exerts a variety of toxic effects in the liver. Apparently, CYP2C11 is responsible for the suicide substrate bioactivation of methapyrilene and the acute toxicologic outcome largely relied upon an abundance of detoxifying enzymes present in the liver Another potentially very significant effect of MP is that it induces a large increase in hepatic cell proliferation coupled with mitochondrial proliferation. In addition, some results suggest that methapyrilene hydrochloride is a DNA damaging agent (Althaus, Lawrence, Sattler and Pitot (1982). DNA damage induced by the antihistaminic drug methapyrilene hydrochloride. Mutat Res 3-6, 213-8; Ratra, Cottrell and Powell (1998). Effects of induction and inhibition of cytochromes P450 on the hepatotoxicity of methapyrilene. Toxicol Sci 1, 185-96).

[0042] Tetracyclines and Doxycyclines lead to dose-dependent hepatic injury. The hepatotoxicity of tetracyclines is well known. The characteristic lesion is microvesicular steatosis which poor prognosis, resembling Reye's syndrome. The underlying mechanism of toxicity seems to be the inhibition of mitochondrial beta oxidation together with an inhibition of the transport of lipids from the liver (Hopf, Bocker and Estler (1985). Comparative effects of tetracycline and doxycycline on liver function of young adult and old mice. Arch Int Pharmacodyn Ther 1, 157-68; Lienart, Morissens, Jacobs and Ducobu (1992). Doxycycline and hepatotoxicity. Acta Clin Belg 3, 205-8).

[0043] Diclofenac is a widely used NSAID (non-steroid anti-inflammatory drug). Several cases related hepatic injury, sometimes with fatal outcome, with the administration of this compound. The The pattern of injury is usually hepatocellular with acute necrosis. The mechanism by which diclofenac elicits this effect is unknown, but some speculations have been made regarding metabolic idiosyncracy. Also, diclofenac can bind irreversibly to hepatic proteins via its acyl glucuronide metabolite; these protein adducts could be involved in the pathogenesis of diclofenac-associated liver damage (Kretz-Rommel and Boelsterli (1994). Mechanism of covalent adduct formation of diclofenac to rat hepatic microsomal proteins. Retention of the glucuronic acid moiety in the adduct. Drug Metab Dispos 6, 956-61).

[0044] Nitrofurantoin is an antimicrobial widely used in the treatment of urinary tract infection which is known to cause acute and chronic liver injury. The injury can be either cholestatic or hepatocellular, and the underlying mechanism seems to be immunologic idiosyncrasy (Villa, Carugo and Guaitani (1992). No evidence of intracellular oxidative stress during ischemia-reperfusion damage in rat liver in vivo. Toxicol Lett 2-3, 283-90; Tacchini, Fusar-Poli and Bernelli-Zazzera (2002). Activation of transcription factors by drugs inducing oxidative stress in rat liver. Biochem Pharmacol 2, 139-148).

[0045] Aflatoxin B1 is a contaminant in food, source: Aspergillus flavus and Aspergillus parasiticus. Aflatoxin induces also ROS production, lipid peroxidation and 8-OhdG formation in DNA. It reacts also with various liver and blood plasma proteins, particularly with serum albumin. Acutelly, it leads to liver necrosis, given chronically shows a carcinogenic effect (Liu, Yang, Lee, Shen, Ang and Ong (1999). Effect of Salvia miltiorrhiza on aflatoxin BI-induced oxidative stress in cultured rat hepatocytes. Free Radic Res 6, 559-68; Barton, Hill, Yee, Barton, Ganey and Roth (2000). Bacterial lipopolysaccharide exposure augments aflatoxin B(1)-induced liver injury. Toxicol Sci 2, 444-52).

[0046] Amineptine, amiodarone and perhexiline are drugs known to cause microvesicular steatosis through the inhibition of mitochondrial beta oxidation (Le Dinh, Freneaux, Labbe, Letteron, Degott, Geneve, Berson, Larrey and Pessayre (1988). Amineptine, a tricyclic antidepressant, inhibits the mitochondrial oxidation of fatty acids and produces microvesicular steatosis of the liver in mice. J Pharmacol Exp Ther 2, 745-50; Bach, Schultz, Cohen, Squire, Gordon, Thung and Schaffner (1989). Amiodarone hepatotoxicity: progression from steatosis to cirrhosis. Mt Sinai J Med 4, 293-6; Deschamps, DeBeco, Fisch, Fromenty, Guillouzo and Pessayre (1994). Inhibition by perhexiline of oxidative phosphorylation and the beta-oxidation of fatty acids: possible role in pseudoalcoholic liver lesions. Hepatology 4, 948-61; Fromenty and Pessayre (1997). Impaired mitochondrial function in microvesicular steatosis. Effects of drugs, ethanol, hormones and cytokines. J Hepatol Suppl 2, 43-53).

[0047] In the present invention it was found that the modulation of gene expression by several compounds that show a similar hepatotoxicity defines a characteristic profile which is expected to be similar for further compounds that elicit the same type of toxicity. Thus, these profiles can be used for the prediction of the toxic potential of unknown compounds. Said characteristic profiles (or “fingerprints) for classes of hepatotoxins are defined in Table 3.

[0048] Accordingly, the present invention relates to a method of predicting at least one toxic effect of a compound, comprising detecting the level of expression of one or more genes from Table 3 in a tissue or cell sample exposed to the compound, wherein differential expression of the genes in Table 3 is indicative of at least one toxic effect.

[0049] The present invention moreover provides a method of predicting at least one toxic effect of a compound, comprising:

[0050] (a) detecting the level of expression of one or more genes from Table 3 in a tissue or cell sample exposed to the compound;

[0051] (b) comparing the level of expression of the genes to their level of expression in a control tissue or cell sample, wherein differential expression of the genes in Table 3 is indicative of at least one toxic effect.

[0052] In a further embodiment, the present invention relates to a method of predicting the progression of a toxic effect of a compound, comprising detecting the level of expression in a tissue or cell sample exposed to the compound of one or more genes from Table 3, wherein differential expression of the genes in Table 3 is indicative of toxicity progression.

[0053] As defined in the present invention, a toxic effect includes any adverse effect on the physiological status of a cell or an organism. The effect includes changes at the molecular or cellular level. A preferred toxic effect is hepatotoxicity, which includes pathologies comprising among others liver necrosis, hepatitis, fatty liver and cholestasis.

[0054] The progression of a toxic effect is defined as the histological, functional or physiological manifestation with time of a toxic injury that can be detected by measuring the gene expression levels found after initial exposure of an animal or cell to a drug, drug candidate, toxin, pollutant etc.

[0055] In general, a method to predict a toxic effect of a compound or a composition of compounds comprises the steps of exposing a model animal or a cell culture to the compound or composition of compounds, detecting or measuring the differential expression (mRNA, protein-content, etc) of one or more genes from Table 3 in a biological sample of said model animal or said cell culture compared to a control, and comparing the determined differential expression to the differential expression disclosed in Table 3.

[0056] In the context of the present invention, the term “expression level” comprises, inter alia, the gene expression levels defined as RNA-levels, i.e. the amount or quality of RNA, mRNA, and the corresponding cDNA-levels; and the protein expression levels.

[0057] The term “differential gene expression” in accordance with this invention relates to the up- or down-regualtion of genes in tissues or cells derived from treated animals/cell cultures in comparison to control animals/cell cultures. These genes, which are differentially expressed, are also refered to as marker genes. Furthermore, it is envisaged that said comparison is carried out in a computer-assisted fashion. Said comparison may also comprise the analysis in high-throughput screens.

[0058] Most preferably, an increase or decrease of the expression level in (a) marker gene(s) as listed in Table 3 and as detected by the inventive method is indicative of hepatotoxic liability. It is also preferred that in addition to the said marker genes, the gene expression profile as depicted in Table 3 will also be analyzed in order to categorize hepatotoxic liability of the test compound(s).

[0059] It is also envisaged that the method of the invention comprises the comparison of differentially expressed marker genes, i.e. marker genes which are up or downregulated in tissues, cells, body fluids etc, from biological samples after exposure to model compounds (as exemplified in Tables 1 and 2), with markers which are not changed, i.e. which are not diagnostic for hepatotoxicity. Such unchanged marker genes comprise, inter alia, the ribosomal RNA control as employed in the appended examples, as well as house-keeping genes (N° 10 as depicted in Table 4).

[0060] The detection and/or measurement of the expression levels of the genes from Table 3 according to the methods of the present invention may comprise the detection of an increase, decrease and/or the absence of a specific nucleic acid molecule, for example mRNA or cDNA.

[0061] Methods for the detection/measurement of mRNA and or cDNA levels are well known in the art and comprise methods as described in the appended examples, but are not limited to microarray- and PCR-technology.

[0062] In addition, protein expression levels from marker genes as listed in Table 4 and of some genes in Table 3 can also be assessed. Methods for the detection/measurement of protein levels are well known in the art and include, but are not limited to Western-blot, two-dimensional electrophoresis, ELISA, RIA, immunohistochemistry, etc.

[0063] Additional assay formats may be used to monitor the induced change of the expression level of a gene identified in Table 3. For instance, mRNA expression may be monitored directly by hybridization of probes to the nucleic acids of the invention. Cell lines are exposed to the agent to be tested under appropriate conditions and time and total RNA or mRNA is isolated by standard procedures such as those disclosed in Sambrook et al (Molecular Cloning: A Laboratory 30 Manual, 2nd Ed. Cold Spring Harbor Laboratory Press, 1989).

[0064] Any assay format to detect gene expression may be used. For example, traditional Northern blotting, dot or slot blot, nuclease protection, primer directed amplification, RT-PCR, semi- or quantitative PCR, branched-chain DNA and differential display methods may be used for detecting gene expression levels. Those methods are useful for some embodiments of the invention. In cases where smaller numbers of genes are detected, amplification-based assays may be most efficient. Methods and assays of the invention, however, may be most efficiently designed with hybridization-based methods for detecting the expression of a large number of genes. Any hybridization assay format may be used, including solution-based and solid support-based assay formats.

[0065] In another assay format, cell lines that contain reporter gene fusions between the open reading frame and/or the transcriptional regulatory regions of a gene in Table 3 and any assayable fusion partner may be prepared. Numerous assayable fusion partners are known and readily available including the firefly luciferase gene and the gene encoding chloramphenicol acetyltransferase (Alam et al. (1990) Anal. Biochem. 188, 245-254). Cell lines containing the reporter gene fusions are then exposed to the compound to be tested under appropriate conditions and time. Differential expression of the reporter gene between samples exposed to the compound and control samples identifies compounds which modulate the expression of the nucleic acid.

[0066] Preferably in the method of the present invention, the expression of at least one gene as listed in Table 3 is detected/measured. Yet, it is also envisaged that the expression of at least two, at least three, at least five, at least ten, at least twenty, at least thirty, at least forty, at least fifty, at least one hundred genes as listed in Table 3 are detected/measured. Moreover, it is envisaged that the expression of nearly all genes from Table 3 or of all genes from Table 3 is detected. It is furthermore envisaged that specific patterns of differentially expressed marker genes as depicted in Table 3 are detected, measured and/or compared.

[0067] The above mentioned animal model to be employed in the methods of the present invention and comprising and/or expressing a maker gene as defined herein is a non-human animal, preferably a mammal, most preferably mice, rats, sheep, calves, dogs, monkeys or apes. Most preferred are rodent models such as rats and mice. The animal model also comprises non-human transgenic animals, which preferably express at least one toxicity marker gene as disclosed in Table 3.

[0068] Yet it is also envisaged that non-human transgenic animals be produced which do not express marker genes as disclosed in Table 3 or which over-express said marker genes.

[0069] Transgenic non-human animals comprising and/or expressing the up-regulated marker genes of the present invention or, in contrast which comprise silenced or less efficient versions of down-regulated marker genes for hepatotoxicity, as well as cells derived thereof, are useful models for studying hepatotoxicity mechanisms.

[0070] Accordingly, said transgenic animal model may be transfected or transformed with the vector comprising a nucleic acid molecule coding for a marker gene as disclosed in Table 3. Said animal model may therefore be genetically modified with a nucleic acid molecule encoding such a marker gene or with a vector comprising such a nucleic acid molecule. The term “genetically modified” means that the animal model comprises in addition to its natural genome a nucleic acid molecule or vector as defined herein and coding for a toxicity marker of Table 3 or at least a fragment thereof. Said additional genetic material may be introduced into the animal model or into one of its predecessors/parents. The nucleic acid molecule or vector may be present in the genetically modified animal model or cell either as an independent molecule outside the genome, preferably as a molecule which is capable of replication, or it may be stably integrated into the genome of the animal model or cell thereof.

[0071] As mentioned herein above, the method of the present invention may also employ a cell culture. Preferred are cultures of primary animal cells or cell lines. Suitable animal cells are, for instance, primary mammalian hepatocytes; insect cells, vertebrate cells, preferably mammalian cell lines, such as e.g. CHO, HeLa, NIH3T3 or MOLT-4. Further suitable cell lines known in the art are obtainable from cell line depositories, like the American Type Culture Collection (ATCC). Most preferred are primary hepatocyte cultures or hepatic cell lines comprising rodent or human primary hepatocyte cultures including monolayer, sandwich cultures and slices cultures; as well as rodent cell lines such as BRL3, NRL clone9, and human cell lines such as HepG2 cells.

[0072] Cells or cell lines used in the method of the present invention may be transfected or transformed with a vector comprising a nucleic acid molecule coding for a marker gene as disclosed in Table 3. Said cell or cell line may therefore be genetically modified with a nucleic acid molecule encoding such a marker gene or with a vector comprising such a nucleic acid molecule. The term “genetically modified” means that the cell comprises in addition to its natural genome a nucleic acid molecule or vector as defined herein and coding for a toxicity marker of Table 3 or at least a fragment thereof. The nucleic acid molecule or vector may be present in the genetically modified cell either as an independent molecule outside the genome, preferably as a molecule which is capable of replication, or it may be stably integrated into the genome of the cell.

[0073] In accordance with the present invention, the term “biological sample” or “sample” as employed herein means a sample which comprises material wherein said differential expression of marker genes may be measured and may be obtained. “Samples” may be tissue samples derived from tissues of non-human animals, as well as cell samples, derived from cells of non-human animals or from cell cultures. For animal experimentation, biological samples comprise target organ tissues obtained after necropsy or biopsy and body fluids, such as blood or urine. For possible clinical use of the markers, particular preferred samples comprise body fluids, like blood, sera, plasma, urine, synovial fluid, spinal fluid, cerebrospinal fluid, semen or lymph, as well as body tissues obtained by biopsy. Particularly documented in the appended examples are rat liver tissues and primary hepatocyte cultures. Peripheral blood samples were also obtained to analyze circulating liver enzymes.

[0074] The cell population that is exposed to the compound or composition may be exposed in vitro or in vivo. For instance, cultured or freshly isolated hepatocytes, in particular rat hepatocytes, may be exposed to the compound under standard laboratory and cell culture conditions. In another assay format, in vivo exposure may be accomplished by administration of the compound to a living animal, for instance a laboratory rat. Procedures for designing and conducting toxicity tests in in vitro and in vivo systems are well known, and are described in many texts on the subject, such as Loomis et al. (Loomis's Esstentials of Toxicology, 4th Ed. Academic Press, New York, 1996; Echobichon, The Basics of Toxicity Testing, CRC Press, Boca Raton, 1992; Frazier, editor, In Vitro Toxicity Testing, Marcel Dekker, New York, 1992) and the like. In in vitro toxicity testing, two groups of test organisms are usually employed: One group serves as a control and the other group receives the test compound in a single dose (for acute toxicity tests) or a regimen of doses (for prolonged or chronic toxicity tests). Since in some cases, the extraction of tissue as called for in the methods of the invention requires sacrificing the test animal, both the control group and the group receiving the compound must be large enough to permit removal of animals for sampling tissues, if it is desired to observe the dynamics of gene expression through the duration of an experiment. In setting up a toxicity study, extensive guidance is provided in the literature for selecting the appropriate test organism for the compound being tested, route of administration, dose ranges, and the like. Water or physiological saline (0.9% NaCl in water) is the solute of choice for the test compound since these solvents permit administration by a variety of routes. When this is not possible because of solubility limitations, vegetable oils such as corn oil or organic solvents such as propylene glycol may be used.

[0075] A method of predicting the mechanism of toxicity of a compound comprising detecting the level of expression in a tissue or cell sample exposed to the compound of one or more genes from Table 3 is also provided, wherein differential expression of the genes in Table 3 is associated with a specific mechanism of toxicity.

[0076] By “mechanism of toxicity” it is meant the measurable manifestation of the toxic event, regarding target organ, time of onset, underlying molecular mechanism (i.e. DNA-damage, formation of protein adduct, etc) histopathological and biochemical findings such as circulating liver enzymes. Gene expression profiles can also be characteristic of a toxicity mechanism.

[0077] Different mechanisms of toxicity are known for hepatotoxins. Direct acting compounds are those compounds that cause damage to macromolecules, in particular proteins and lipids by directly interacting with them. This interaction could occur through the test compound itself or, more commonly, through a highly reactive metabolite thereof. Histological manifestations of these class of hepatoxicity include hepatocellular necrosis, lipid peroxidation and elevation of circulating levels of enzymes of hepatic origin such as ALT (alanine aminotransferase). Inflammation can also be observed due to the activation of the hepatic Kupffer cells. Steatotic compounds are those that cause an accummulation of fat in the liver. There are tvo types of steatosis: macrovesicular steatosis and microvesicular steatosis. All the test compounds used in this invention belong to the latter type. Characteristic of microvesicular steatosis is the accumulation of small lipid vesicles in the hepatocytes (so-called fatty liver), which usually lead to accute liver failure. The underlying molecular mechanisms are thought to be an inhibition of mitochondrial beta oxidation (due to mitochondrial damage) and/or an inhibition of the export of fatty acids from the hepatocyte. Compounds leading to cholestasis impair the bile flow, causing the clinical manifestation of jaundice. Intrahepatic cholestasis involves usually the inhibition of the bile acid transporters in the hepatocytes, leading to an accummulation of bile acids. Increased bile acids are responsible for slight hepatocyte injury, little inflammation and the elevation of circulating alkaline phosphatase (G. L. Plaa and W. R. Hewitt Ed. “Toxicology of the liver, 2nd Ed., Target organ toxicology series, 1997; Fromenty and Pessayre (1995). Inhibition of mitochondrial beta-oxidation as a mechanism of hepatotoxicity. Pharmacol Ther 1, 101-54; Jaeschke, Gores, Cederbaum, Hinson, Pessayre and Lemasters (2002). Mechanisms of hepatotoxicity. Toxicol Sci 2, 166-76).

[0078] Detection of toxic potential as identified and/or obtained by the methods of the present invention are particularly useful in the development of new drugs in terms of safety.

[0079] Moreover, a method of predicting at least one toxic effect of a compound, comprising detecting the level of expression of progression elevated gene 3 (PEG-3) or Translocon associated protein (TRAP) from Table 4 in a tissue or cell sample exposed to the compound is provided, wherein differential expression of PEG-3 and TRAP is indicative of at least one toxic effect. The preferred toxic effect of the compound in the present method is hepatotoxicity.

[0080] PEG-3 belongs to the family of GADD-45 and GADD-153, which are genes up-regulated upon DNA-damage. While GADD-genes are known stress-inducible markers that lead to a cell cycle arrest (Seth A, Giunta S, Franceschil C, Kola I, Venanzoni MC (1999). Regulation of the human stress response gene GADD153 expression: role of ETS1 and FLI-1 gene products. Cell Death Differ 6(9), 902-7; Tchounwou PB, Wilson BA, Ishaque AB, Schneider J. Atrazine potentiation of arsenic trioxide-induced cytotoxicity and gene expression in human liver carcinoma cells (HepG2). Mol Cell Biochem. 222, 49-59; Tchounwou PB, Ishaque AB, Schneider J (2001). Cytotoxicity and transcriptional activation of stress genes in human liver carcinoma cells (HepG2) exposed to cadmium chloride. Mol Cell Biochem. 222, 21-8; Tchounwou PB, Wilson BA, Ishaque AB, Schneider J (2001). Transcriptional activation of stress genes and cytotoxicity in human liver carcinoma cells (HepG2) exposed to 2,4,6-trinitrotoluene, 2,4-dinitrotoluene, and 2,6-dinitrotoluene. Environ Toxicol. 16, 209-16.; Zhan Q, Fan S, Smith ML, Bae I, Yu K, Alamo I Jr, O'Connor PM, Fornace AJ Jr (1996). Abrogation of p53 function affects gadd gene responses to DNA base-damaging agents and starvation. DNA Cell Biol 15, 805-15), PEG-3 is involved in progression (Park JS, Qiao L, Su ZZ, Hinman D, Willoughby K, McKinstry R, Yacoub A, Duigou GJ, Young CS, Grant S, Hagan MP, Ellis E, Fisher PB, Dent P (2001). Ionizing radiation modulates vascular endothelial growth factor (VEGF) expression through multiple mitogen activated protein kinase dependent pathways. Oncogene 20, 3266-80.; Su ZZ, Goldstein NI, Jiang H, Wang Minn., Duigou GJ, Young CS, Fisher PB (1999). PEG-3, a nontransforming cancer progression gene, is a positive regulator of cancer aggressiveness and angiogenesis. Proc Natl Acad Sci U S A. 96, 15115-20; Su Z, Shi Y, Friedman R, Qiao L, McKinstry R, Hinman D, Dent P, Fisher PB (2001). PEA3 sites within the progression elevated gene-3 (PEG-3) promoter and mitogen-activated protein kinase contribute to differentialPEG-3 expression in Ha-ras and v-raf oncogene transformed rat embryo cells. Nucleic Acids Res 29, 1661-71; Su, Z. Z., Shi, Y., and Fisher, P. B. (1997). Subtraction hybridization identifies a transformation progression associated gene PEG-3 with sequence homology to a growth arrest and DNA damage-inducible gene. Proc Natl Acad Sci U S A 94, 9125-30). The results of the present invention show that the up-regulation of PEG-3 seems to be triggered earlier than that of GADDs, so that it is a possible early marker for cell damage.

[0081] TRAP proteins are part of a complex whose function is to bind Ca²⁺ to the membrane of the endoplasmic reticulum (ER) and regulate thereby the retention of ER resident proteins (Hartmann E, Gorlich D, Kostka S, Otto A, Kraft R, Knespel S, Burger E, Rapoport TA, Prehn S (1993). A tetrameric complex of membrane proteins in the endoplasmic reticulum. Eur J Biochem. 214, 375-81).

[0082] Compounds used in the method of the present invention may be unknown compounds or compounds which are known to elicit a toxic effect in an organism.

[0083] Compounds in accordance with the method of the present invention include, inter alia, peptides, proteins, nucleic acids including DNA, RNA, RNAi, PNA, ribozymes, antibodies, small organic compounds, small molecules, ligands, and the like.

[0084] The compounds whose toxic effect is to be predicted with the method(s) of the present invention do not only comprise single, isolated compounds. It is also envisaged that mixtures of compounds are screened with the method of the present invention. It is also possible to employ natural products and extracts, like, inter alia, cellular extracts from prokaryotic or eukaryotic cells or organisms.

[0085] In addition, the compound identified by the inventive method as having low toxic effect can be employed as a lead compound to achieve modified site of action, spectrum of activity and/or organ specificity, and/or improved potency, and/or decreased toxicity (improved therapeutic index), and/or decreased side effects, and/or modified onset of therapeutic action, duration of effect, and/or modified pharmakinetic parameters (resorption, distribution, metabolism and excretion), and/or modified physico-chemical parameters (solubility, hygroscopicity, color, taste, odor, stability, state), and/or improved general specificity, organ/tissue specificity, and/or optimized application form and route, and may be modified by esterification of carboxyl groups, or esterification of hydroxyl groups with carbon acids, or esterification of hydroxyl groups to, e.g. phosphates, pyrophosphates or sulfates or hemi succinates, or formation of pharmaceutically acceptable salts, or formation of pharmaceutically acceptable complexes, or synthesis of pharmacologically active polymers, or introduction of hydrophylic moieties, or introduction/exchange of substituents on aromates or side chains, change of substituent pattern, or modification by introduction of isosteric or bioisosteric moieties, or synthesis of homologous compounds, or introduction of branched side chains, or conversion of alkyl substituents to cyclic analogues, or derivatisation of hydroxyl group to ketales, acetales, or N-acetylation to amides, phenylcarbamates, or synthesis of Mannich bases, imines, or transformation of ketones or aldehydes to Schiffs bases, oximes, acetales, ketales, enolesters, oxazolidines, thiozolidines or combinations thereof.

[0086] In another embodiment, the present invention provides for a set of nucleic acid primers, wherein the primers specifically amplify at least two of the genes from Table 3. The set of nucleic acid primers may also specifically amplify at least 5, at least 10, at least 20, at least 30 of the genes from Table 3. The set of nucleic acid primers may also specifically amplify nearly all or all of the genes from Table 3.

[0087] Moreover, the present invention provides for a set of nucleic acid probes, wherein the probes comprise sequences which hybridize to at least two of the genes from Table 3. The set of nucleic acid probes may comprise sequences which hybridize to at least 5, at least 10, at least 20, at least 30 of the genes from Table 3. The set of nucleic acid probes may also comprise sequences which hybridize to nearly all or all of the genes from Table 3.

[0088] In a further embodiment, the set of probes may be attached to a solid support. A solid support comprising at least two probes, wherein each of the probes comprises a sequence that specifically hybridizes to a gene in Table 3 is also provided. The solid support may also comprise at least 5 probes, at least 10, at least 20, at least 30 probes. The solid support may also comprise all or nearly all probes, wherein each of the probes comprises a sequence that specifically hybridizes to a gene in Table 3.

[0089] Solid supports containing oligonucleotide or cDNA probes for differentially expressed genes of the invention can be filters, polyvinyl chloride dishes, particles, beads, microparticles or silicon or glass based chips, etc. Such chips, wafers and hybridization methods are widely available, for example, those disclosed in WO95/11755. Any solid surface to which a nucleotide sequence can be bound, either directly or indirectly, either covalently or non-covalently, can be used. A preferred solid support is a DNA chip. These contain a particular probe in a predetermined location on the chip. Each predetermined location may contain more than one molecule of the probe, but each molecule within the predetermined location has an identical sequence. Such predetermined locations are termed features. There may be, for example, from 2, 10, 100, 1000 to 10000, 100000 or 400000 of such features on a single solid support. The solid support, or the area within which the probes are attached may be on the order of about a square centimeter.

[0090] Probes corresponding to the genes of Table 3 may be attached to single or multiple solid support structures, e.g., the probes may be attached to a single chip or to multiple chips to comprise a chip set. Probe arrays for expression monitoring can be made and used according to any techniques known in the art (see for example, Lockhart et al., Nat. Biotechnol. (1996) 14, 1675-1680; McGall et al., Proc. Nat. Acad. Sci. USA (1996) 93, 13555-60). Such probe arrays may contain at least two or more probes that are complementary to or hybridize to two or more of the genes described in Table 3. For instance, such arrays may contain probes that are complementary or hybridize to at least 2, 3, 4, 5, 6, 7, 8, 9, 10, 20, 30, 50, 70, 100 or more of the genes described herein. Preferred arrays contain probes for all or nearly all of the genes listed in Table 3. In a preferred embodiment, arrays are constructed that contain probes to detect all or nearly all of the genes of Table 3 on a single solid support substrate, such as a chip. The sequences of the expression marker genes of Table 3 are available in public databases and their GenBank Accession Number is provided (see www.rzcbi.nlm.nih.gov/). These sequences may be used in the methods of the invention or may be used to produce the probes and arrays of the invention. As described above, in addition to the sequences of the GenBank Accessions Numbers disclosed in Table 3, sequences such as naturally occurring variant or polymorphic sequences may be used in the methods and compositions of the invention. For instance, expression levels of various allelic or homologous forms of a gene disclosed in the Table 3 may be assayed. Any and all nucleotide variations that do not alter the functional activity of a gene listed in Table 3, including all naturally occurring allelic variants of the genes herein disclosed, may be used in the methods and to make the compositions (e.g., arrays) of the invention.

[0091] Probes based on the sequences of the genes described above may be prepared by any commonly available method. “Probe” refers to a hybridizable nucleotide sequence that can be attached to a solid support or used in a liquid form. As used herein a “probe” is defined as a nucleic acid sequence, capable of binding to a target nucleic acid of complementary sequence through one or more types of chemical bonds, usually through complementary base pairing, usually through hydrogen bond formation. As used herein, a probe may include natural (i.e., A, G, U, C, or T) or modified bases (7-deazaguanosine, inosine, etc.). In addition, the bases in probes may be joined by a linkage other than a phosphodiester bond, so long as it does not interfere with hybridization. Thus, probes may be peptide nucleic acids in which the constituent bases are joined by peptide bonds rather than phosphodiester linkages. Said probes are specific oligonucleotides or cDNA-fragments. Oligonucleotide probes or cDNAs for screening or assaying a tissue or cell sample are preferably of sufficient length to specifically hybridize only to appropriate, complementary genes or transcripts. Typically the oligonucleotide probes will be at least 10, 12, 14, 16, 18, 20 or 25 nucleotides in length. In some cases, longer probes of at least 30, 40, or 50 nucleotides will be desirable. Typically, the cDNA probes will be between 300 and 1000 nucleotides in length. As used herein, oligonucleotide sequences that are complementary to one or more of the genes described in Table 3 refer to probes that are capable of hybridizing under stringent conditions to at least part of the nucleotide sequences of said genes. Such hybridizable probes will typically exhibit at least about 75% sequence identity at the nucleotide level to said genes, preferably about 80% or 85% sequence identity or more preferably about 90% or 95% or more sequence identity to said genes. The phrase “hybridizing specifically to” refers to the binding, duplexing, or hybridizing of a molecule substantially to or only to a particular nucleotide sequence or sequences under stringent conditions when that sequence is present in a complex mixture (e.g., total cellular) DNA or RNA. Assays and methods of the invention may utilize available formats to simultaneously screen at least 2, preferably about tens to thousends different nucleic acid hybridizations. The terms “background” or “background signal intensity” refer to hybridization signals resulting from non-specific binding, or other interactions, between the labeled target nucleic acids and components of the oligonucleotide array (e.g., the probes, control probes, the array substrate, etc.). Background signals may also be produced by intrinsic fluorescence of the array components themselves. A single background signal can be calculated for the entire array, or a different background signal may be calculated for each target nucleic acid. One of skill in the art will appreciate that where the probes to a particular gene hybridize well and thus appear to be specifically binding to a target sequence, they should not be used in a background signal calculation. Background can also be calculated as the average signal intensity produced by regions of the array that lack any probes at all.

[0092] One of skill in the art will appreciate that an enormous number of array designs are suitable for the practice of this invention. The array will typically include a number of test probes, at least 2, preferably tens to thousends that specifically hybridize to the sequences of interest. Probes may be produced from any region of the identified genes. In instances where the gene reference in the Tables is an EST, probes may be designed from that sequence or from other regions of the corresponding full-length transcript that may be available in any of the sequence databases, such as those herein described. Any available software may be used to produce specific probe sequences, including, for instance, software available from Applied Biosystems (Primer Express). The said probes may be attached to the solid support by a variety of methods, including among others synthesis onto the glass and spotting of a specified amount of cDNA onto the support. In addition to test probes that bind the target nucleic acid(s) of interest, the arrays can contain a number of control probes. The control probes may fall into three categories referred to herein as 1) normalization controls; 2) expression level controls; and 3) unspecific binding controls. Normalization controls are probes that are complementary to labeled reference oligonucleotides or other nucleic acid sequences that are added to the nucleic acid sample to be screened. The signals obtained from the normalization controls after hybridization provide a control for variations in hybridization conditions, label intensity, “reading” efficiency and other factors that may cause the signal of a perfect hybridization to vary between arrays. Signals read from all other probes in the array may be divided by the signal (e.g., fluorescence intensity) from the control probes thereby normalizing the measurements. Virtually any probe may serve as a normalization control. However, it is recognized that hybridization efficiency varies with base composition and probe length. Preferred normalization probes are selected to reflect the average length of the other probes present in the array. Expression level controls are probes that hybridize specifically with constitutively expressed genes in the biological sample. Virtually any constitutively expressed gene provides a suitable target for expression level controls. Typically expression level control probes have sequences complementary to subsequences of constitutively expressed “housekeeping genes” including, but not limited to the actin gene, the transferrin receptor gene, the GAPDH gene, and the like. Unspecific binding controls can be but are not limited to DNA from other species (i.e. Hering Sperm DNA) that should not hybridize with the target sequences or mismatched sequences. Mismatched sequences are oligonucleotide probes or other nucleic acid probes identical to their corresponding test or control probes except for the presence of one or more mismatched bases. A mismatched base is a base selected so that it is not complementary to the corresponding base in the target sequence to which the probe would otherwise specifically hybridize. One or more mismatches are selected such that under appropriate hybridization conditions (e.g. stringent conditions) the test or control probe would be expected to hybridize with its target sequence, but the mismatch probe would not hybridize (or would hybridize to a significantly lesser extent). Unspecific binding controls thus provide a control for non-specific binding or cross hybridization to a nucleic acid in the sample other than the target to which the probe is directed.

[0093] Cell or tissue samples may be exposed to the test compound in vitro or in vivo. When cultured cells or tissues are used, appropriate mammalian liver extracts may also be added with the test agent to evaluate compound s that may require biotransformation to exhibit toxicity. In a preferred format, primary isolates of animal or human hepatocytes which already express the appropriate complement of drug-metabolizing enzymes may be exposed to the test compound without the addition of mammalian liver extracts. The genes which are assayed according to the present invention are typically in the form of mRNA or reverse transcribed mRNA. The genes may be cloned or not. The genes may be amplified or not. The cloning and/or amplification do not appear to bias the representation of genes within a population. In some assays, it may be preferable, however, to use polyA+RNA as a source, as it can be used with less processing steps. As is apparent to one of ordinary skill in the art, nucleic acid samples used in the methods and assays of the invention may be prepared by any available method or process. Methods of isolating total mRNA are well known to those of skill in the art. For example, methods of isolation and purification of nucleic acids are described in detail in Chapter 3 of Laboratory Techniques in Biochemistry and Molecular Biology: Hybridization With Nucleic Acid Probes, Part I Theory and Nucleic Acid Preparation, P. Tijssen, Ed., Elsevier, N. Y. (1993). Such samples include RNA samples, but also include cDNA synthesized from a mRNA sample isolated from a cell or tissue of interest. Such samples also include DNA amplified from the cDNA, and RNA transcribed from the amplified DNA. One of skill in the art would appreciate that it is desirable to inhibit or destroy RNase present in homogenates before homogenates are used. Biological samples may be of any biological tissue or fluid or cells from any organism as well as cells raised in vitro, such as cell lines and tissue culture cells. Frequently the sample will be a tissue or cell sample that has been exposed to a compound, agent, drug, pharmaceutical composition, potential environmental pollutant or other composition, In some formats, the sample will be a “clinical sample” which is a sample derived from a patient. Typical clinical samples include, but are not limited to, sputum, blood, blood-cells (e.g. white cells), tissue or fine needle biopsy samples, urine, peritoneal fluid, and pleural fluid, or cells therefrom. Biological samples may also include sections of tissues, such as frozen sections or formalin fixed sections taken for histological purposes.

[0094] Nucleic acid hybridization simply involves contacting a probe and target nucleic acid under conditions where the probe and its complementary target can form stable hybrid duplexes through complementary base pairing (See WO99/32660). The nucleic acids that do not form hybrid duplexes are then washed away leaving the hybridized nucleic acids to be detected, typically through detection of an attached detectable label. It is generally recognized that nucleic acids are denatured by increasing the temperature or decreasing the salt concentration of the buffer containing the nucleic acids. The term “stringent conditions” refers to conditions under which a probe will hybridize to its target sequence, but with only insubstantial hybridization to other sequences. Stringent conditions are sequence-dependent and will be different in different circumstances. Longer sequences hybridize specifically at higher temperatures. Generally, stringent conditions are selected to be about 5° C. lower than the thermal melting point (Tm) for the specific sequence at a defined ionic strength and pH. Stringent conditions may also be achieved with the addition of destabilizing agents such as formamide. Under low stringency conditions (e.g. low temperature and/or high salt) hybrid duplexes (e.g. DNA:DNA, RNA:RNA, or RNA:DNA) will form even where the annealed sequences are not perfectly complementary. Thus, specificity of hybridization is reduced at lower stringency. Conversely, at higher stringency (e.g. higher temperature or lower salt) successful hybridization tolerates fewer mismatches. One of skill in the art will appreciate that hybridization conditions may be selected to provide any degree of stringency. In a preferred embodiment, hybridization is performed at low stringency, to ensure hybridization and then subsequent washes are performed at higher stringency to eliminate mismatched hybrid duplexes. Successive washes may be performed at increasingly higher stringency until a desired level of hybridization specificity is obtained. Stringency can also be increased by addition of agents such as formamide. Hybridization specificity may be evaluated by comparison of hybridization to the test probes with hybridization to the various controls that can be present (e.g., expression level control, normalization control, mismatch controls, etc.). In general, there is a tradeoff between hybridization specificity (stringency) and signal intensity. Thus, in a preferred embodiment, the wash is performed at the highest stringency that produces consistent results and that provides a signal intensity greater than approximately 10% of the background intensity. Thus, in a preferred embodiment, the hybridized array may be washed at successively higher stringency solutions and read between each wash. Analysis of the data sets thus produced will reveal a wash stringency above which the hybridization pattern is not appreciably altered and which provides adequate signal for the particular probes of interest.

[0095] The hybridized nucleic acids are typically detected by detecting one or more labels attached to the sample nucleic acids. The labels may be incorporated by any of a number of means well known to those of skill in the art (see WO99/32660).

[0096] The present invention includes databases containing DNA sequence information as well as gene expression information from tissue or cells exposed to various standard toxins, such as those herein described (see Tables 1-2). The Toxicogenomics database is supported by in-house developed software (RACE-R, F. Hoffmann-La Roche AG, Basle, Switzerland) which allows the storage, analysis and comparison of absolute (intensity) and relative (fold-induction) gene expression data obtained by a variety of methods such as the aforementioned Affymetrix high density arrays, low density spotted arrays, PCR, etc. This database allows also for the incorporation of additional data such as sample description, biochemical parameters, histological evaluation, etc. Additional databases may also contain information associated with a given DNA sequence or tissue sample such as descriptive information about the gene associated with the sequence information (see Table 3), or descriptive information concerning the clinical status of the tissue sample, or the animal from which the sample was derived. The database may allow the use of algorithms (i.e. Toxicology Model Matcher, F. Hoffmann-La Roche AG, Basle, Switzerland) for the extensive comparison of gene expression profiles between known or unknown test compounds and compounds which are already in the database as listed in Tables 1 and 2. Methods for the configuration and construction of such databases are widely available, for instance, see U.S. Pat. No. 5,953,727. The databases of the invention may be linked to an outside or external database such as GenBank (www.ncbi.nlm.nih.gov/entrez.index.html); KEGG 25 (www.genome.adjp/kegg); SPAD (www.grt.kyushu-u.acjp/spad/index.html); HUGO (www.gene.ucl.ac.uk/hugo); Swiss-Prot (www.expasy.ch.sprot); Prosite (www. expasy. ch/tools/scnpsitl. h&d); OMIM (www. ncbi.nlm.nih.gov/omim); GDB (www.gdb.org); and GeneCard (bioinformatics.weizmann.ac.il/cards). In a preferred embodiment, as described in Tables 3, 7 and 8, the external database is GenBank and the associated databases maintained by the National Center for Biotechnology Information (NCBI) (www.ncbi.nlm.nih.gov). Any appropriate computer platform may be used to perform the necessary comparisons between sequence information, gene expression information and any other information in the database or information provided as an input. For example, a large number of computer workstations are available from a variety of manufacturers. Client/server environments, database servers and networks are also widely available and appropriate platforms for the databases of the invention. The databases of the invention may be used to determine the cell type or tissue in which a given gene is expressed and to allow determination of the abundance or expression level of a given gene in a particular tissue or cell. The databases of the invention may also be used to present information identifying the expression level in a tissue or cell of a set of genes comprising one or more of the genes in Table 3, comprising the step of comparing the expression level of at least one gene in Table 3 in a cell or tissue exposed to a test compound to the level of expression of the gene in the database. Such methods may be used to predict the toxic potential of a given compound by comparing the level of expression of a gene or genes in Table 3 from a tissue or cell sample exposed to the test compound to the expression levels found in a control tissue or cell samples exposed to a standard toxin or hepatotoxin such as those herein described.

[0097] The gene expression data generated by the methods of the present invention may be analysed by various methods known in the art, including but not limited to hierarchical clustering, self-organizing maps and support vector machines. Support Vector Machines (SVMs), a class of supervised learning algorithms originally introduced by Vapnik and co-workers, have already been shown to perform well in multiple areas of biological analysis (Boser, B. E., Guyon, I. M., Vapnik, V. N. (1992) A training algorithm for optimal margin classifiers. In Proceedings of the 4^{th} Annual International Conference on Computational Learning Theory, ACM Press, Pittsburgh, Pa., 144-152; Vapnik, V. N. (1998) Statistical Learning Theory. Wiley, New York; Scholkopf, B., Guyon, I. M., Weston, J. (2002) Statistical Learning and Kernel Methods in Bioinformatics. In Proceedings NATO Advanced Studies Inst. on Artificial Intelligence and Heuristics Methods for Bioinformatics, San Miniato, Italy October 1-11).

[0098] Given a set of training examples, SVMs are able to recognize informative patterns in the input data and generalize on previously unseen data. Trivial solutions, which overfit the training data, are avoided by minimizing the bound on the expected generalization error. In contrast to unsupervised methods like hierarchical clustering and self-organizing maps, the SVM approach takes advantage of prior knowledge in the form of class labels attached to the training examples. The extraordinary robustness with respect to sparse and noisy data makes SVMs the tool of choice in a growing number of applications. They are particularly well suited to analyze microarray expression data because of their ability to handle situations where the number of features (genes) is very large compared to the number of training patterns (chip replicates). It has been demonstrated in several studies that SVMs typically tend to outperform other classification techniques in this field (Brown, M. P. S., Grundy, W. N., Lin, D., Cristianini, N., Sugnet, C. W., Furey, T. S., Ares, M., Haussler, D. (2000) Knowledge-based analysis of microarray gene expression data by using support vector machines. PNAS 97, 262-267; Furey, T. S., Cristianini, N., Duffy, N., Bednarski, D. W., Schummer, M., Haussler, D. (2000) Support Vector machine classification and validation of cancer tissue samples using microarray expression data. Bioinformatics 16, 906-914; Yeang, C., Ramaswamy, S., Tamayo, P., Mukherjee, S., Rifkin, R. M., Angelo, M., Reich, M., Lander, E., Mesirov, J., Golub, T. (2001) Molecular classification of multiple tumor types. Bioinformatics 17, 316-322). In addition, the method proved effective in discovering informative features such as genes which are especially relevant for the classification and therefore might be critically important for the biological processes under investigation (Guyon, I. M., Weston, J., Barnhill, S., Vapnik, V. N. (2002) Gene Selection for Cancer Classification using Support Vector Machines. Machine Learning 46, 389-442).

[0099] The SVM approach can be used to generate classifiers for discrimination of a specific toxicant class from all other classes, but also to generate discriminators to distinguish between a specific toxicant and controls can be defined. Alternatively classifiers for discrimination of toxic and non-toxic compounds can be constructed. These classifiers are useful to predict toxicity as well as for identification of a specific toxicity mechanism.

[0100] Recursive feature elimination (RFE) allows identifying genes that contribute to the greatest extent to classification. In each iteration, a certain fraction of genes is removed from the training procedure, selected by the corresponding weights in the decision function. The least important genes are omitted for the next iteration. During this process, quality parameters of the resulting SVM classifiers are monitored. The final choice of a best subset of genes is made on the basis of classification accuracy, model simplicity and gene count. This method makes no orthogonality assumptions about gene expression levels but implicitly takes into account correlation between the single gene expression measurements. It results in a minimized set of predictive genes by effectively removing noise and redundancy from the set of all genes on the chip. The support vector mechanism, where borderline (and not ‘typical’) training patterns play a crucial role in classifications, was shown to assist in the feature elimination process by preventing genes that are irrelevant for classification but nevertheless differentially expressed in the majority of chip samples from gaining predominant influence (Guyon, I. M., Weston, J., Barnhill, S., Vapnik, V. N. (2002) Gene Selection for Cancer Classification using Support Vector Machines. Machine Learning 46, 389-442). Using RFE a small subset of genes is selected. This subset can subsequently be used as a diagnostic biomarker set to predict toxicity and/or the mechanism of toxicity.

[0101] The present invention therefore also provides a computer system comprising a database containing DNA sequence information and expression information of at least two of the genes from Table 3 from tissue or cells exposed to a hepatotoxin, and a user interface.

[0102] The invention further includes kits combining, in different combinations, nucleic acid primers for the amplification of the genes of Table 3, solid supports with attached probes, reagents for use with the solid supports, protein reagents encoded by the genes of Table 3, signal detection and array-processing instruments, gene expression databases and analysis and database management software described above. The kits may be used, for example, to predict or model the toxic response of a test compound, to monitor the progression of hepatic disease states, to identify genes that show promise as new drug targets and to screen known and newly designed drugs as discussed above.

[0103] The databases packaged with the kits are a compilation of expression patterns from human or laboratory animal genes and gene fragments (corresponding to the genes of Table 3). In particular, the database software and packaged information include the expression results of Table 3 that can be used to predict toxicity of a test compound. In another format, database and software information may be provided in a remote electronic format, such as a website, the address of which may be packaged in the kit.

[0104] The invention is now described by reference to the following examples and figures which are merely illustrative and are not to be construed as a limitation of scope of the present invention.

### EXAMPLES

[0105] Commercially available reagents referred to in the examples were used according to manufacturer's instructions unless otherwise indicated.

### Example 1

### Hepatotoxicity Assay with Non-Human Animals

[0106] All animals received human care as specified by Swiss law and in accordance with the “Guide for the care and use of laboratory animals” published by the NIH. Male Wistar rats (generally 5 animals/dose-group) were purchased from BRL (Futllingsdorf, Switzerland) and housed individually. Treated animals were dosed either orally, intraperitoneally, or intravenously with several doses of test compounds (Table 1). The test compounds were categorized according to their toxic manifestation in the rat liver. Control animals received the same volume of vehicle as placebo. Necropsy was performed 6 or 24 hours after a single administration and liver samples from the left medial lobe were placed immediately in RNALater (Ambion, Tex., USA) for RNA extraction and gene expression analysis. Samples in RNALater were stored at −20° C. until further processing. Additional liver samples were snap-frozen in liquid nitrogen for measurement of intrahepatic lipids and/or proteins.

### Example 2

### Hepatocyte Cell Culture Assay Toxicity

[0107] Hepatocytes were isolated from adult male Wistar rats by two-step collagenase liver perfusion previously described (Goldlin C. R., Boelsterli U. A. (1991). Reactive oxygen species and non-peroxidative mechanisms of cocaine-induced cytotoxicity in rat hepatocyte cultures. Toxicology 69, 79-91). Briefly, the rats were anaesthetized with sodium pentobarbital (120 mg/kg, i.p.). The perfusate tubing was inserted via the portal vein, then the v. cava caudalis was cut, and the perfusion was started. The liver was first perfused for 5 min with a preperfusing solution consisting of calcium-free, EGTA (0.5 mM)-supplemented, HEPES (20 mM)-buffered Hank's balanced salt solution (5.36 mM KCl, 0.44 mM KH₂PO₄, 137 mM NaCl, 4.2 mM NaHCO₃, 0.34 mM Na₂HPO₄, 5.55 mM D-glucose). This was followed by a 12-min perfusion with NaHCO₃ (25 mM)-supplemented Hank's solution containing bovine CaCl₂ (5 mM), and collagenase (0.2 U/ml). Flow rate was maintained at 28 ml/min and all solutions were kept at 37° C. After in situ perfusion the liver was excised and the liver capsule was mechanically disrupted. The cells were suspended in William's Medium E without phenol red (WME, Sigma Chemie, Buchs, Switzerland) and filtered through a set of tissue sieves (30-, 50-, and 80-mesh). Dead cells were removed by a sedimentation step (1×g, for 15 min at 4° C.) followed by a Percoll (Sigma) centrifugation step and an additional centriftigation in WME (50 g, 3 min). Hepatocyte viability was assessed by trypan blue exclusion and typically lied between 85% and 95%. The cells were seeded into collagen-coated 6-well Falcon Primaria® plates at a density of 9×10⁵ cells/well in 2 ml WME supplemented with 10% fetal calf serum (BioConcept, Allschwil, Switzerland), penicillin (100 U/ml, Sigma Chemie, Buchs, Switzerland), streptomycin (0.1 mg/ml, Sigma Chemie, Buchs, Switzerland), insulin (100 nM, Sigma Chemie, Buchs, Switzerland), and dexamethasone (100 nM). After an attachment period of 3 hrs, the medium was replaced by 1.5 ml/well serum-free WME, supplemented with antibiotics and hormones, and incubated overnight at 37° C. in an atmosphere of 5% C02/95% air. Cells were then incubated with the test compounds or vehicle (Table 2) and harvested for RNA extraction at 6 or 24 hours.

### Example 3

### Measurement of Circulating and Hepatic Enzymes

[0108] In the hepatotoxicity assay with non-human animals as described in Example 1, circulating enzymes of hepatic origin, as well as the hepatic lipid content were assessed. Blood samples for clinical chemistry were obtained shortly before sacrifice. The enzymatic activities of aspartate aminotransferase (AST), alanine aminotransferase (ALT), lactate dehydrogenase (LDH) and 5-nucleotidase (5-ND) were measured in serum samples. Liver lipids were extracted using liver homogenates as described by Freneaux et al (Freneaux, E., Labbe, G., Letteron, P., The Le, D., Degott, C., Geneve, J., Larrey, D., and Pessayre, D. (1988). Inhibition of the mitochondrial oxidation of fatty acids by tetracycline in mice and in man: possible role in microvesicular steatosis induced by this antibiotic. Hepatology 8, 1056-62) and the contents of triglycerides, phospholipids and total lipids were measured. Automated analysis was performed using commercially available test kits (Roche Diagnostics, Mannheim, Germany) on a Cobas Fara autoanalyzer (Roche, Basel, Switzerland).

### Example 4

### RNA Sample Preparation

[0109] RNA isolation from hepatocytes was typically performed by resuspending approximately 3 Mio. Cells/1.2 mL RNAzol (Tel-Test Inc., TX, USA). For RNA isolation from liver tissue, a portion of tissue of approximately 100 mg was transferred to a tube containing 1.2 ml RNAzol. Cells or tissue in RNAzol were disrupted in FastPrep tubes for 20 seconds in a Savant homogenizer (Bio101, Buena Vista, Calif., U.S.A.). Total RNA was isolated according to the manufacturer's instruction and quantified by measuring the optical density at 280 nm. The quality of RNA was assessed with gel electrophoresis.

### Example 5

### Synthesis and Hybridization of cRNA

[0110] Double stranded cDNA was synthesized from 20 μg of total RNA using a cDNA Synthesis System (Roche Diagnostics, Mannheim, Germany) with the oligo(dT)₂₄ T7prom)₆₅ primer. The MEGAScript T7 kit (Ambion, Austin, Tex., U.S.A.) was used to transcribe the cDNA into cRNA in the presence of Biotin-11-CTP and Biotin-16-UTP (Enzo, Farmingdale, N. Y., U.S.A.) according to the instructions supplied with the kit. After purification with the RNeasy kit (Qiagen, Hilden, Germany) integrity of the cRNA was checked using gel electrophoresis. 10-15 μg fragmented cRNA were used for hybridization to the RG-U34A array (Affymetrix GeneChip® array, Santa Clara, Calif.). The oligonucleotide array used in the present study contains probe sets for over 5000 rat genes. Hybridization and staining were performed basically as described previously (Lockhart DJ, Dong H, Byrne MC, Follettie MT, Gallo MV, Chee MS, Mittmann M, Wang C, Kobayashi M, Horton H, Brown EL (1996). Expression monitoring by hybridization to high-density oligonucleotide arrays. Nat Biotechnol. 14, 1675-80.; de Saizieu A, Certa U, Warrington J, Gray C, Keck W, Mous J. (1998). Bacterial transcript imaging by hybridization of total RNA to oligonucleotide arrays. Nat Biotechnol. 16, 45-8). Arrays were scanned with a confocal laser scanner (Hewlett-Packard, Palo Alto, Calif., USA).

### Example 6

### Expression Analysis

[0111] After hybridization and scanning, the expression level of each gene was calculated by subtracting the fluorescence intensity of the mismatch probes from the match signal (=average difference) using the GENECHIP 3.1 software or its up-dated versions MAS 4.0 and MAS 5.0 (Affymetrix). Gene expression data were further analyzed with an in-house-developed data analysis tool (RACE-A, Hoffmann-La Roche, Basel, Switzerland). Data sets of treated versus time and vehicle matched control were generated for each treatment (treated vs. controls) and compared. Analyzed data were stored in a toxicogenomics database (RACE-R, Hoffmann-La Roche, Basel, Switzerland). For the gene expression analysis, difference of means, fold-induction, statistical significance (Students' t-test) were applied for querying the data base. Likewise, increase in circulating liver enzymes (ALT, AST, ALP, etc.) were analyzed. A linear regression was performed between gene expression levels for each gene and circulating enzyme levels. An example of correlation between gene expression and circulating ALT levels is given in FIG. 1.

### Example 7

### Detection of Profiles and Specific Marker Genes

[0112] Gene expression changes common to a number of compounds belonging to the same hepatotoxicity mechanism were considered profiles typical for this mechanism. The profiles were determined after the in vivo exposure of adult male Wistar rats to 18 compounds, from which 6 were steatotic, 6 were direct acting and 6 were cholestatic. For each tested compound, one or several independent experiments were performed. The results are depicted in Table 3, showing that 680 differentially expressed genes were identified in vivo: 30 of them were only regulated in livers after exposure to steatotic compounds; 18 were regulated after exposure to cholestatic compounds; and 559 after exposure to direct acting compounds. 11 genes showed regulation by all types of tested toxic compounds and are probably related to cellular stress. Others show regulation by two types of toxicity mechanisms.

[0113] In addition to the defined profiles, gene expression levels and their correlation (linear regression) with the circulating liver enzymes were used to select genes whose expression varied across the samples. These genes were chosen as possible toxicity markers and selected with less stringent filtering criteria. Candidate marker genes were categorized as follows:

[0114] a) differentially expressed genes (up-regulated in animals showing elevated enzymes in comparison to the matched controls, 2-fold change, p<0.05), b) differentially expressed genes (down-regulated in animals showing elevated enzymes in comparison to the matched controls, 2-fold change, p<0.05); c) genes that fulfilled the criteria in a) but that additionally showed an up-regulation at doses and/or time points at which no elevation of circulating enzymes could be detected; d) genes that fulfilled the criteria in b) but that additionally showed an down-regulation at doses and/or time points at which no elevation of circulating enzymes could be detected. Some of these marker genes are listed in Table 4. Among them, PEG-3 (progression elevated gene 3, # 1 in the said Table 4) and TRAP (translocon-associated protein, #9 in Table 4) showed very good characteristics as a possible early predictor in vivo (Michael Fountoulakis, Maria-Cristina de Vera, Flavio Crameri, Franziska Boess, Rodolfo Gasser, Silvio Albertini, Laura Suter: “Modulation of gene and protein expression by carbon tetrachloride in the rat liver”, Toxicol and Appl. Pharmacol. Aug. 15, 2002;183(1):71-80) as well as in vitro. This is represented in FIGS. 1 through 4.

### Example 8

### Data Validation for Selected Genes

[0115] The regulation of the mRNA levels of several candidate genes (Table 4) was verified with quantitative RT-PCR. Specific primers for these genes have been designed in order to evaluate the expression with RT-PCR using SybrGreen assay (Table 6). For each performed RT-PCR reaction, the specificity of the assay was evaluated with dissociation curve software (Applied Biosystems), as well as by assessment of the size of the product using either gel electrophoresis or Agilent Bioanalyzer. The obtained results are described in this example and generally confirmed the results obtained using GeneChips (analysis performed with microarray suite version MAS 4.0 or MAS 5.0).

[0116] Western-blot analysis was performed on 10 micrograms total liver protein following standard laboratory procedures. Proteins transferred onto a nitrocellulose membrane were incubated with the first antibody (Anti-cytochrome p450 2B 1, raised in goat, purchased at GenTest, Mass.); followed by an incubation with the second antibody (donkey anti-sheep/Goat Immunoglobulin Horseradish Peroxidase Conjugated, from Chemikon). Chemoluminiscence was quantified by densitometry in a Multimage Light Cabinet (Alpha Inotech Corporation, San Leandro, Calif., USA) using Lumilight (Roche Diagnostics AG, Rotkreuz, Switzerland) solution.

[0117] Real-time PCR is a truly quantitative method, while genechip-analysis is only semi-quantitative for transcriptional expression studies. In a first step, the induction of the mRNA levels of 9 candidate genes (Table 5 and FIG. 10) was verified with quantitative PCR. The results obtained with both methods showed that the expression of these genes would allow the differentiation of a steatotic compound from a pharmacological analogue that does not show steatotic potential. These genes could be possible diagnostic and predictive molecular markers for different mechanisms of hepatic toxicity. As an internal control, the house-keeping gene glycernine-aldehyde-phosphate-dehydrogenase (GAPDH) was also analyzed.

[0118] 5-HT6 Receptor Antagonists

[0119] RT-PCR results confirmed that the two 5-HT6 receptor antagonists could be distinguished using the expression levels of few marker genes (FIG. 10). Note that for some of the selected genes, a slight induction with the non-toxic compound Ro 66-0074 was also observed. However, this induction was minor when compared to the larger effect elicited by the toxic compound Ro 65-7199 so that differentiation of both compounds remains possible.

[0120] In addition, Western blots were performed using specific antibodies against the cytochrome P450 CYP2B family in order to evaluate if the clear induction of messenger RNA also led to an increase in the hepatic protein levels. The results of the protein levels of CYP2B closely paralleled the amounts of mRNA at 24 hours and at 7 days after Ro 65-7199 treatment. However, the induction of CYP2B could not be detected 6 hours after administration of Ro 65-7199, in spite of the increased levels of messenger RNA. This is due to the time lag between protein and mRNA induction (FIG. 11).

[0121] Direct Acting Compounds Regulate the GADD-Family

[0122] Further experiments with RT-PCR confirmed results regarding the induction of genes from the GADD family, namely GADD-45, GADD-153 and PEG-3 by direct acting compounds (Hydrazine, Thioacetamide, 1,2-dichlorobenzene) (Table 9). The induction of these genes correlates with the histopathological findings in a time related fashion: While PEG-3 seems to be an early marker, GADD-45 and GADD-143 appear regulated at later time points, when the tissue damage is obvious by conventional endpoints. These results are in line with literature and confirm the assumption that PEG-3 is an early marker for hepatic damage.

[0123] Induction of EGR1 by Tolcapone (Tasmar) and Dinitrophenol

[0124] Tolcapone (Tasmar) is a human hepatotoxin with no known toxicity in the rat. In this experiment, a slight induction of EGR1 was detected after exposure of rats to a high dose of Tolcapone (300 mg/kg) and dinitrophenol (10 and 30 mg/kg). The induction was slight and showed high inter-individual variability but experiments with RT-PCR confirmed these results (Table 10).

[0125] EGR1 (early growth response gene 1, EMBL_ro:rnngf1a) is a transcription factor that is also known by synonyms such as Zif268, NGF1-A, Krox24, TIS8. Its name derives of the kinetics of its induction, since it is a primary transcribed signal: the protein can be induced within minutes of a stimulus and then decays within hours (Khachigian, L. M. and T. Collins, Inducible expression of Egr-1-dependent genes. A paradigm of transcriptional activation in vascular endothelium. Circ Res, 1997. 81(4): p. 457-61; Yan, S.F., et al., Egr-1: is it always immediate and early? J Clin Invest, 2000. 105(5): p. 553-4). Nevertheless, maintained high expression of EGR1 has been described in atherosclerotic tissue and in connection to cell death in Alzheimer's disease, establishing a relationship between EGR1 overexpression and chronic conditions (McCaffrey, T. A., et al., High-level expression of Egr-1 and Egr-1-inducible genes in mouse and human atherosclerosis. J Clin Invest, 2000. 105(5): p. 653-62). Its function under normal conditions is still unclear, since EGR1-null mice display normal phenotype with exception of infertility in females (Lee, S. L., et al., Luteinizing hormone deficiency and female infertility in mice lacking the transcription factor NGFI-A (Egr-1). Science, 1996.273(5279): p. 1219-21). Thus, the physiological role of EGR1 might only become manifest upon environmental challenge. This gene has been found overexpressed in several pathologic conditions, including exposure to ionising radiation, prostate cancer and hypoxia (Weichselbaum, R. R., et al., Radiation-induced tumour necrosis factor-alpha expression: clinical application of transcriptional and physical targeting of gene therapy. Lancet Oncol, 2002.3(11): p. 665-71). The up-regulation of EGR1 after hypoxia leads to vascular and perivascular tissue damage. In particular in lung, EGR1 induction leads an increase of Tissue Factor (TF) and to deposition of fibrin in the lung vasculature (Yan, S. F., et al., Egr-1, a master switch coordinating upregulation of divergent gene families underlying ischemic stress. Nat Med, 2000.6(12): p. 1355-61). EGR1-deficient mice show significantly reduced prostate tumor formation and significantly less pulmonary vascular permeability and therefore better survival after ischemic injury (Abdulkadir, S. A., et al., Impaired prostate tumorigenesis in Egr1-deficient mice. Nat Med, 2001.7(1): p.101-7; Ten, V. S. and D. J. Pinsky, Endothelial response to hypoxia: physiologic adaptation and pathologic dysfunction. Curr Opin Crit Care, 2002.8(3): p.242-50).

[0126] The literature reports suggest a possible involvement of EGR1 as an early signal to injury that triggers subsequent tissue damage. In particular in the liver, a link between mitochondrial uncoupling (as caused by dinitrophenol) and induction of EGR1 was established. Also, tolcapone (Tasmar) has been described as having mitochondrial uncoupling properties in vitro. Thus, it is suggested that the induction of EGR1 in rats exposed to tolcapone (Tasmar) might lead to hepatic tissue injury if the physiological environment (i.e. existing disease or genetic background) is appropriate. This would explain the low incidence of human hepatotoxicity caused by tolcapone (Tasmar).

### Example 9

### Expression Data Analysis with Support Vector Machines

[0127] Adult male Wistar rats were dosed in vivo and the resulting expression profile in liver was determined. SVMs were built for the discrimination between 3 different classes of hepatotoxicants, non-toxic substances and controls. The training set consisted of 180 gene expression profiles from individual animals treated with direct acting, cholestatic, steatotic, non-toxic compounds and corresponding vehicle-dosed controls. As a first step the chips were rescaled to a median value of 0 and a standard deviation of 1. Subsequently chips were presented to a linear kernel SVM (for classifier training the SVM software package from William Stafford Noble, Department of Computer Science, Columbia University, New York was used. Procedures for the Recursive Feature Elimination (RFE), automation of the whole training cycles and further data analysis were developed in house, using the PERL language.) Single binary classifiers for each category of chips were obtained by training one group against all others (‘One-vs-All’ training method). Multi-class classification for a given test chip was then carried out by combining the outputs of all binary classifiers. A leave-one-out cross validation procedure was applied to assess the quality of the trained machines with respect to the training data. This method consists of removing one sample from the training set, building a classifier on the basis of the remaining data and then testing on the withheld example. By removing all replicates of one compound from the training data, followed by classifying these chips with the resulting decision function, the individual contribution of the given compound for a successful classifier could be examined. RFE was used to investigate the relationship between the number of genes for generating the classifiers, the resulting prediction accuracy, cross-validation errors and the number of used support vectors. The first iteration reduced the gene count to a multiple of 2. In each subsequent iteration the gene count was halved until 32 genes remained. Afterwards only one gene per iteration was removed. An example of a RFE for the direct acting class is shown in FIG. 7.

[0128] Based on classification accuracy, model simplicity and gene count a SVM was selected for each class. As can be seen the SVM for discrimination of direct acting compounds from all others was based on 6 genes. The corresponding gene numbers for the other SVMs were:

[0129] Steatotic (6 genes), cholestatic (21 genes), non-toxic (19 genes) and controls (46 genes).

[0130] Compounds not present in the initial training set were subsequently classified based on their expression profiles. Expression profiles for individual animals were classified using the 5 previously generated support vector machines. The successful identification of amineptine as a steatotic compound is depicted in FIG. 8 and the identification of 1,2-Dichlorobenzene as a direct acting compound is shown in FIG. 9. The bigger a positive value is, the better is the data fit into a specific class defined by the respective SVM. A negative discriminant value means that data do not fit into a compound class.

[0131] The above-described method was used to find class-specific genes that allow discrimination of a class from all other classes (class-discriminating genes, Table 7).

[0132] The same approach was also used to find toxicant specific genes for each of the categories. Using RFE SVMs for the discrimination of direct acting compounds from controls were generated. Based on classification accuracy, model simplicity and gene count one SVM was selected for discrimination of the direct acting group from the control group. This classifier was based on 14 genes (specific genes for the direct acting group, Table 8).

[0133] The same procedure was repeated for the steatotic and the cholestatic class. The classifier for the cholestatic group contained 34 genes and the classifier for the steatotic group contained 3 genes (Table 8). The genes required to separate a class from all other classes or just from controls can therefore be different.

TABLE 1

| | | | | Hepato- |
|---|---|---|---|---|
| | | | Target | toxicity |
| Compound | Dose levels | | organ | Mechanism |
| Chlorpromazine | 15 | mg/kg | Liver | Cholestatic |
| Cyclosporine A | 5, 15 and 30 | mg/kg | Liver | Cholestatic |
| Erythromycin | 734 | mg/kg | Liver | Cholestatic |
| Glibenclamide | 2.5 and 25 | mg/kg | Liver | Cholestatic |
| Lithocholic acid | 60 and 120 | μmol/kg | Liver | Cholestatic |
| Ro 48-5695 (ETA) | 25 | mg/kg | Liver | Cholestatic |
| Dexamethasone | 0.6 | mg/kg | Liver | Cyp inducer/ |
| | | | | prolif |
| 1,2-Dichloro- | 1.5 and 4.5 | mmol/kg | Liver | Direct |
| benzene | | | | Acting |
| Aflatoxin B1 | 1 and 4 | mg/kg | Liver | Direct |
| | | | | Acting |
| Bromobenzene | 1 and 3 | mmol/kg | Liver | Direct |
| | | | | Acting |
| Carbon | 0.25 and 2 | ml/kg | Liver | Direct |
| tetrachloride | | | | Acting |
| Diclofenac | 10, 30, 100 | mg/kg | Liver | Direct |
| | | | | Acting |
| Hydrazine | 10, 60, 90 | mg/kg | Liver | Direct |
| | | | | Acting |
| Nitrofurantoin | 5, 20, 60 | mg/kg | Liver | Direct |
| | | | | Acting |
| Thioacetamide | 2, 10, 50 | mg/kg | Liver | Direct |
| | | | | Acting |
| Concanavaline A | 0.1, 20 | mg/kg | Liver | Hepatitis/ |
| | | | | Infammation |
| Tacrine | 5, 15 and 35 | mg/kg | Liver | Human |
| | | | | Hepatotox |
| Tempium | 20 and 1000 | mg/kg | Liver | Human |
| (Lazabemide) | | | | hepatotox |
| Tolcapone | 300 | mg/kg | Liver | Human |
| (Tasmar) | | | | hepatotox |
| 1,4-Dichloro- | 4.5 | mmol/kg | Liver | Non toxic |
| benzene | | | | |
| Amineptin | 125, 250, 500 | μmol/kg | Liver | Steatotic |
| Amiodarone | 50, 100, 600 | mg/kg | Liver | Steatotic |
| Doxycycline | 5, 20, 40 | mg/kg | Liver | Steatotic |
| Ro 28-1674 (GKA) | 250 | mg/kg | Liver | Steatotic |
| Ro 28-1675 (GKA) | 100 | mg/kg | Liver | Steatotic |
| Ro 65-7199 (5HT6) | 30, 100, 400 | mg/kg | Liver | Steatotic |
| Tetracycline | 125, 200, 250 | μmol/kg | Liver | Steatotic |
| Dinitrophenol | 10 and 30 | mg/kg | Liver | Uncoupling |

Ro 48-5695: Pyridin-2-ylcarbamic acid 2-[6-(5-isopropyl-pyridin-2-ylsulfonylamino)-5-(2-methoxy-phenoxy)-2-morpholin-4-yl-pyrimidin-4-yloxyl-ethyl ester; Ro 28-1674: 3-Cyclopentyl-2[S]-(4-methanesulfonyl-phenyl)-N-thiazol-2-yl-propionamide; Ro 28-1675: 3-Cyclopentyl-2[R]-(4-methanesulfonyl-phenyl)-N-thiazol-2-yl-propionamide.

[0134] TABLE 2

| | | | Hepa- | |
|---|---|---|---|---|
| | | | tocyte | Hepato- |
| | Test | | culture | toxicity |
| Compound | Concentrations | | System | Mechanism |
| Chlorpromazine | 10, 30 100 | μM | Monolayer | Cholestatic |
| Cyclosporine A | 0.5 and 5 | μM | Monolayer | Cholestatic |
| Erythromycin | 100 and 300 | μM | Monolayer | Cholestatic |
| Lithocholic acid | 10 and 30 | μM | Monolayer | Cholestatic |
| Ro 48-5695 | 20 and 60 | μM | Monolayer | Cholestatic |
| (ETA) | | | | |
| Cyproterone | 5 and 25 | μM | Monolayer | Cyp inducer/ |
| Acetate | | | | prolif |
| Phenobarbital | 200 and 2000 | μM | Monolayer | Cyp inducer/ |
| | | | | prolif |
| Clofibrate | 100 and 1000 | μM | Monolayer | Cyp inducer/ |
| | | | | prolif |
| Acetaminophen | 1000, 2500 and 5000 | μM | Monolayer | Direct |
| | | | | Acting |
| Acetaminophen | 1000, 2500 | μM | Sandwich | Direct |
| | | | | Acting |
| Bromobenzene | 1000 and 2000 | μM | Monolayer | Direct |
| | | | | Acting |
| Carbon | 3000 and 5000 | μM | Monolayer | Direct |
| tetrachloride | | | | Acting |
| Hydrazine | 8000 and 16000 | μM | Monolayer | Direct |
| | | | | Acting |
| Methapyrilene | 20 | μM | Sandwich | Direct |
| | | | | Acting |
| Methapyrilene | 100, 300 and 1000 | μM | Monolayer | Direct |
| | | | | Acting |
| Nitrofurantoin | 20, 100 and 200 | μM | Monolayer | Direct |
| | | | | Acting |
| Thioacetamide | 3000 and 10000 | μM | Monolayer | Direct |
| | | | | Acting |
| Thioacetamide-S- | 30, 100 and 300 | μM | Monolayer | Direct |
| Oxide | | | | Acting |
| Amineptin | 500, 1000 and 1500 | μM | Monolayer | Steatotic |
| Amiodarone | 30, 70, 100 and 300 | μM | Monolayer | Steatotic |
| Doxycycline | 100, 500 and 1000 | μM | Monolayer | Steatotic |
| Perhexiline | 3, 10 and 30 | μM | Monolayer | Steatotic |
| Ro 28-1674 | 19 and 75 | μM | Monolayer | Steatotic |
| (GKA) | | | | |
| Ro 28-1675 | 19 and 75 | μM | Monolayer | Steatotic |
| (GKA) | | | | |
| Ro 65-7199 | 20 and 100 | μM | Monolayer | Steatotic |
| (5HT) | | | | |
| Tetracycline | 100 and 500 | μM | Monolayer | Steatotic |

[0135] TABLE 3
Gene identifiers are given as the Affymetrix ID from the Affymetrix GeneChip ®
RG-U34A. The accession numbers refer to GenBank and for each type of
hepatotoxicity, the direction of the gene regulation is indicated (1 for up-regulation, −1
for down-regulation). Blank cells indicate the lack of regulation under the used analysis
criteria.

| | | Direct | | | Acc | SEQ |
|---|---|---|---|---|---|---|
| Affymetrix ID | Cholestatic | Acting | Steatotic | Profile | Number | ID NO |
| AF023087_s_at | 1 | 1 | 1 | Unspecific | AF023087 | 1 |
| D11445exon#1- | 1 | 1 | 1 | Unspecific | D11445 | 2 |
| 4_s_at | | | | | | |
| L25785_at | −1 | −1 | −1 | Unspecific | L25785 | 3 |
| M18416_at | 1 | 1 | 1 | Unspecific | M18416 | 4 |
| M58634_at | 1 | 1 | 1 | Unspecific | M58634 | 5 |
| M60921_g_at | 1 | 1 | 1 | Unspecific | M60921 | 6 |
| rc_AA891041_at | 1 | 1 | 1 | Unspecific | AA891041 | 7 |
| rc_AA893485_at | −1 | −1 | −1 | Unspecific | AA893485 | 8 |
| rc_AI137856_s_at | 1 | 1 | 1 | Unspecific | AI137856 | 9 |
| rc_AI172293_at | −1 | −1 | −1 | Unspecific | AI172293 | 10 |
| U75397UTR#1_s_at | 1 | 1 | 1 | Unspecific | U75397 | 11 |
| AF003835_at | | −1 | 1 | Steatotic/ | AF003835 | 12 |
| | | | | Direct Acting | | |
| AF014503_at | | 1 | 1 | Steatotic/ | AF014503 | 13 |
| | | | | Direct Acting | | |
| AF079864_at | | −1 | −1 | Steatotic/ | AF079864 | 14 |
| | | | | Direct Acting | | |
| D14989_f_at | | −1 | −1 | Steatotic/ | D14989 | 15 |
| | | | | Direct Acting | | |
| D17370_at | | −1 | −1 | Steatotic/ | D17370 | 16 |
| | | | | Direct Acting | | |
| D17370_g_at | | −1 | −1 | Steatotic/ | D17370 | 17 |
| | | | | Direct Acting | | |
| D44495_s_at | | 1 | 1 | Steatotic/ | D44495 | 18 |
| | | | | Direct Acting | | |
| E01524cds_s_at | | 1 | 1 | Steatotic/ | E01524 | 19 |
| | | | | Direct Acting | | |
| J02585_at | | −1 | −1 | Steatotic/ | J02585 | 20 |
| | | | | Direct Acting | | |
| L16764_s_at | | 1 | 1 | Steatotic/ | L16764 | 21 |
| | | | | Direct Acting | | |
| L16995_at | | −1 | −1 | Steatotic/ | L16995 | 22 |
| | | | | Direct Acting | | |
| M15481_at | | −1 | −1 | Steatotic/ | M15481 | 23 |
| | | | | Direct Acting | | |
| M21208mRNA_s_at | | 1 | 1 | Steatotic/ | M21208 | 24 |
| | | | | Direct Acting | | |
| M23572_at | | −1 | −1 | Steatotic/ | M23572 | 25 |
| | | | | Direct Acting | | |
| rc_AA799766_at | | 1 | 1 | Steatotic/ | AA799766 | 26 |
| | | | | Direct Acting | | |
| rc_AA800224_at | | 1 | −1 | Steatotic/ | AA800224 | 27 |
| | | | | Direct Acting | | |
| rc_AA891713_at | | 1 | 1 | Steatotic/ | AA891713 | 28 |
| | | | | Direct Acting | | |
| rc_AA892775_at | | 1 | 1 | Steatotic/ | AA892775 | 29 |
| | | | | Direct Acting | | |
| rc_AA946503_at | | 1 | 1 | Steatotic/ | AA946503 | 30 |
| | | | | Direct Acting | | |
| rc_AI145931_at | | −1 | −1 | Steatotic/ | AI145931 | 31 |
| | | | | Direct Acting | | |
| rc_AI169327_g_at | | 1 | 1 | Steatotic/ | AI169327 | 32 |
| | | | | Direct Acting | | |
| rc_AI176546_at | | 1 | 1 | Steatotic/ | AI176546 | 33 |
| | | | | Direct Acting | | |
| rc_AI177004_s_at | | −1 | −1 | Steatotic/ | AI177004 | 34 |
| | | | | Direct Acting | | |
| rc_AI639391_at | | −1 | −1 | Steatotic/ | AI639391 | 35 |
| | | | | Direct Acting | | |
| X05684_at | | −1 | −1 | Steatotic/ | X05684 | 36 |
| | | | | Direct Acting | | |
| X52625_at | | −1 | −1 | Steatotic/ | X52625 | 37 |
| | | | | Direct Acting | | |
| X91234_at | | −1 | −1 | Steatotic/ | X91234 | 38 |
| | | | | Direct Acting | | |
| AA848218_at | | | 1 | Steatotic | AA848218 | 39 |
| AB010635_s_at | | | 1 | Steatotic | AB010635 | 40 |
| AF022136_at | | | −1 | Steatotic | AF022136 | 41 |
| AF087839mRNA#1_s_at | | | 1 | Steatotic | AF087839 | 42 |
| K02814_at | | | 1 | Steatotic | K02814 | 43 |
| L09647_at | | | −1 | Steatotic | L09647 | 44 |
| L32132_at | | | 1 | Steatotic | L32132 | 45 |
| L36460mRNA_at | | | 1 | Steatotic | L36460 | 46 |
| M10068mRNA_s_at | | | 1 | Steatotic | M10068 | 47 |
| M14369exon#2_at | | | 1 | Steatotic | M14369 | 48 |
| M23566exon_s_at | | | 1 | Steatotic | M23566 | 49 |
| M35300_f_at | | | 1 | Steatotic | M35300 | 50 |
| rc_AA892522_at | | | −1 | Steatotic | AA892522 | 51 |
| rc_AA894316_at | | | −1 | Steatotic | AA894316 | 52 |
| rc_AA900582_at | | | 1 | Steatotic | AA900582 | 53 |
| rc_AI044985_at | | | −1 | Steatotic | AI044985 | 54 |
| rc_AI175764_s_at | | | −1 | Steatotic | AI175764 | 55 |
| rc_AI176351_s_at | | | 1 | Steatotic | AI176351 | 56 |
| rc_AI230256_at | | | −1 | Steatotic | AI230256 | 57 |
| rc_AI639108_at | | | −1 | Steatotic | AI639108 | 58 |
| rc_H31144_g_at | | | 1 | Steatotic | H31144 | 59 |
| S81478_s_at | | | −1 | Steatotic | S81478 | 60 |
| U02553cds_s_at | | | −1 | Steatotic | U02553 | 61 |
| U08214_s_at | | | 1 | Steatotic | U08214 | 62 |
| U35345_s_at | | | 1 | Steatotic | U35345 | 63 |
| U48220_at | | | −1 | Steatotic | U48220 | 64 |
| U88630_at | | | 1 | Steatotic | U88630 | 65 |
| X07648cds_g_at | | | 1 | Steatotic | X07648 | 66 |
| X62952_at | | | 1 | Steatotic | X62952 | 67 |
| X91810_at | | | 1 | Steatotic | X91810 | 68 |
| AA799276_at | | 1 | | Direct Acting | AA799276 | 69 |
| AB002086_g_at | | 1 | | Direct Acting | AB002086 | 70 |
| AB004096_at | | −1 | | Direct Acting | AB004096 | 71 |
| AB009636_at | | −1 | | Direct Acting | AB009636 | 72 |
| AB010466_s_at | | 1 | | Direct Acting | AB010466 | 73 |
| AB010963_s_at | | −1 | | Direct Acting | AB010963 | 74 |
| AB012230_g_at | | −1 | | Direct Acting | AB012230 | 75 |
| AB014722_g_at | | 1 | | Direct Acting | AB014722 | 76 |
| AB015433_s_at | | 1 | | Direct Acting | AB015433 | 77 |
| AB016536_s_at | | 1 | | Direct Acting | AB016536 | 78 |
| AB017188_at | | 1 | | Direct Acting | AB017188 | 79 |
| AB020504_at | | −1 | | Direct Acting | AB020504 | 80 |
| AF001417_s_at | | 1 | | Direct Acting | AF001417 | 81 |
| AF013144_at | | 1 | | Direct Acting | AF013144 | 82 |
| AF017637_at | | −1 | | Direct Acting | AF017637 | 83 |
| AF020618_at | | 1 | | Direct Acting | AF020618 | 84 |
| AF021935_at | | 1 | | Direct Acting | AF021935 | 85 |
| AF025308_f_at | | 1 | | Direct Acting | AF025308 | 86 |
| AF029240_g_at | | −1 | | Direct Acting | AF029240 | 87 |
| AF029310_at | | 1 | | Direct Acting | AF029310 | 88 |
| AF030086UTR#1_at | | −1 | | Direct Acting | AF030086 | 89 |
| AF030087UTR#1_at | | 1 | | Direct Acting | AF030087 | 90 |
| AF030087UTR#1_g_at | | 1 | | Direct Acting | AF030087 | 91 |
| AF036335_at | | 1 | | Direct Acting | AF036335 | 92 |
| AF037072_at | | −1 | | Direct Acting | AF037072 | 93 |
| AF039890mRNA_s_at | | −1 | | Direct Acting | AF039890 | 94 |
| AF041066_at | | −1 | | Direct Acting | AF041066 | 95 |
| AF044574_at | | −1 | | Direct Acting | AF044574 | 96 |
| AF045464_s_at | | 1 | | Direct Acting | AF045464 | 97 |
| AF05661UTR#1_at | | 1 | | Direct Acting | AF050661 | 98 |
| AF054618_s_at | | 1 | | Direct Acting | AF054618 | 99 |
| AF058791_at | | 1 | | Direct Acting | AF058791 | 100 |
| AF061443_at | | −1 | | Direct Acting | AF061443 | 101 |
| AF062594_g_at | | 1 | | Direct Acting | AF062594 | 102 |
| AF062741_g_at | | −1 | | Direct Acting | AF062741 | 103 |
| AF063447_at | | 1 | | Direct Acting | AF063447 | 104 |
| AF067650_at | | 1 | | Direct Acting | AF067650 | 105 |
| AF069782_at | | 1 | | Direct Acting | AF069782 | 106 |
| AF080507_at | | −1 | | Direct Acting | AF080507 | 107 |
| AF080507_g_at | | −1 | | Direct Acting | AF080507 | 108 |
| AF082124_s_at | | 1 | | Direct Acting | AF082124 | 109 |
| AF084186_s_at | | 1 | | Direct Acting | AF084186 | 110 |
| AF087037_at | | 1 | | Direct Acting | AF087037 | 111 |
| AJ011607_g_at | | −1 | | Direct Acting | AJ011607 | 112 |
| AJ012603UTR#1_at | | 1 | | Direct Acting | AJ012603 | 113 |
| AJ222724_at | | 1 | | Direct Acting | AJ222724 | 114 |
| AJ224120_at | | 1 | | Direct Acting | AJ224120 | 115 |
| D00636cds_s_at | | −1 | | Direct Acting | D00636 | 116 |
| D00636Poly_A_Site#1_s_at | | −1 | | Direct Acting | D00636 | 117 |
| D00698_s_at | | −1 | | Direct Acting | D00698 | 118 |
| D10354_s_at | | 1 | | Direct Acting | D10354 | 119 |
| D10587_g_at | | 1 | | Direct Acting | D10587 | 120 |
| D10756_g_at | | 1 | | Direct Acting | D10756 | 121 |
| D12769_at | | 1 | | Direct Acting | D12769 | 122 |
| D13122_f_at | | 1 | | Direct Acting | D13122 | 123 |
| D13623_at | | 1 | | Direct Acting | D13623 | 124 |
| D13623_g_at | | 1 | | Direct Acting | D13623 | 125 |
| D13667cds_s_at | | 1 | | Direct Acting | D13667 | 126 |
| D13907_at | | 1 | | Direct Acting | D13907 | 127 |
| D13978_s_at | | 1 | | Direct Acting | D13978 | 128 |
| D14014_at | | 1 | | Direct Acting | D14014 | 129 |
| D14425_s_at | | 1 | | Direct Acting | D14425 | 130 |
| D14564cds_s_at | | −1 | | Direct Acting | D14564 | 131 |
| D14987_f_at | | −1 | | Direct Acting | D14987 | 132 |
| D21800_g_at | | 1 | | Direct Acting | D21800 | 133 |
| D25224_at | | 1 | | Direct Acting | D25224 | 134 |
| D25224_g_at | | 1 | | Direct Acting | D25224 | 135 |
| D26564_at | | 1 | | Direct Acting | D26564 | 136 |
| D28557_s_at | | 1 | | Direct Acting | D28557 | 137 |
| D28560_at | | −1 | | Direct Acting | D28560 | 138 |
| D28560_g_at | | −1 | | Direct Acting | D28560 | 139 |
| D30649mRNA_s_at | | −1 | | Direct Acting | D30649 | 140 |
| D30666_at | | −1 | | Direct Acting | D30666 | 141 |
| D30804_at | | 1 | | Direct Acting | D30804 | 142 |
| D30804_g_at | | 1 | | Direct Acting | D30804 | 143 |
| D31662exon#4_s_at | | −1 | | Direct Acting | D31662 | 144 |
| D31874_at | | 1 | | Direct Acting | D31874 | 145 |
| D38061exon_s_at | | 1 | | Direct Acting | D38061 | 146 |
| D38062exon_s_at | | 1 | | Direct Acting | D38062 | 147 |
| D38381_s_at | | −1 | | Direct Acting | D38381 | 148 |
| D38468_s_at | | 1 | | Direct Acting | D38468 | 149 |
| D43964_at | | −1 | | Direct Acting | D43964 | 150 |
| D45247_at | | 1 | | Direct Acting | D45247 | 151 |
| D50694_at | | 1 | | Direct Acting | D50694 | 152 |
| D63704_at | | −1 | | Direct Acting | D63704 | 153 |
| D63704_g_at | | −1 | | Direct Acting | D63704 | 154 |
| D82928_at | | 1 | | Direct Acting | D82928 | 155 |
| D85435_at | | 1 | | Direct Acting | D85435 | 156 |
| D85435_g_at | | 1 | | Direct Acting | D85435 | 157 |
| D87839_g_at | | −1 | | Direct Acting | D87839 | 158 |
| D87991_at | | 1 | | Direct Acting | D87991 | 159 |
| D88034_at | | 1 | | Direct Acting | D88034 | 160 |
| D88890_at | | 1 | | Direct Acting | D88890 | 161 |
| D89069_f_at | | 1 | | Direct Acting | D89069 | 162 |
| D89514_at | | 1 | | Direct Acting | D89514 | 163 |
| D89983_at | | 1 | | Direct Acting | D89983 | 164 |
| D90109_at | | −1 | | Direct Acting | D90109 | 165 |
| D90265_s_at | | 1 | | Direct Acting | D90265 | 166 |
| E12286cds_at | | −1 | | Direct Acting | E12286 | 167 |
| E12625cds_at | | −1 | | Direct Acting | E12625 | 168 |
| J02589mRNA#2_at | | −1 | | Direct Acting | J02589 | 169 |
| J02646_at | | 1 | | Direct Acting | J02646 | 170 |
| J02679_s_at | | 1 | | Direct Acting | J02679 | 171 |
| J02962_at | | 1 | | Direct Acting | J02962 | 172 |
| J03179_g_at | | 1 | | Direct Acting | J03179 | 173 |
| J03572_i_at | | 1 | | Direct Acting | J03572 | 174 |
| J03969_at | | 1 | | Direct Acting | J03969 | 175 |
| J04187_at | | −1 | | Direct Acting | J04187 | 176 |
| J04791_s_at | | 1 | | Direct Acting | J04791 | 177 |
| J04943_at | | 1 | | Direct Acting | J04943 | 178 |
| J05035_g_at | | −1 | | Direct Acting | J05035 | 179 |
| J05122_at | | 1 | | Direct Acting | J05122 | 180 |
| J05166_at | | 1 | | Direct Acting | J05166 | 181 |
| J05210_at | | −1 | | Direct Acting | J05210 | 182 |
| J05210_g_at | | −1 | | Direct Acting | J05210 | 183 |
| K01934mRNA#2_at | | −1 | | Direct Acting | K01934 | 184 |
| K03045cds_r_at | | 1 | | Direct Acting | K03045 | 185 |
| K03249_at | | −1 | | Direct Acting | K03249 | 186 |
| L01267_at | | 1 | | Direct Acting | L01267 | 187 |
| L03294_g_at | | 1 | | Direct Acting | L03294 | 188 |
| L07114_at | | −1 | | Direct Acting | L07114 | 189 |
| L07407_at | | 1 | | Direct Acting | L07407 | 190 |
| L08505_at | | 1 | | Direct Acting | L08505 | 191 |
| L12025_at | | 1 | | Direct Acting | L12025 | 192 |
| L12382_at | | −1 | | Direct Acting | L12382 | 193 |
| L12383_at | | 1 | | Direct Acting | L12383 | 194 |
| L13235UTR#1_f_at | | −1 | | Direct Acting | L13235 | 195 |
| L13600_at | | 1 | | Direct Acting | L13600 | 196 |
| L13635_s_at | | 1 | | Direct Acting | L13635 | 197 |
| L17127_g_at | | 1 | | Direct Acting | L17127 | 198 |
| L19031_at | | −1 | | Direct Acting | L19031 | 199 |
| L19931_at | | 1 | | Direct Acting | L19931 | 200 |
| L19998_at | | −1 | | Direct Acting | L19998 | 201 |
| L20900_at | | 1 | | Direct Acting | L20900 | 202 |
| L22294_at | | −1 | | Direct Acting | L22294 | 203 |
| L22339_at | | −1 | | Direct Acting | L22339 | 204 |
| L22339_g_at | | −1 | | Direct Acting | L22339 | 205 |
| L23148_g_at | | 1 | | Direct Acting | L23148 | 206 |
| L24207_r_at | | −1 | | Direct Acting | L24207 | 207 |
| L27075_g_at | | −1 | | Direct Acting | L27075 | 208 |
| L27843_s_at | | 1 | | Direct Acting | L27843 | 209 |
| L32591mRNA_at | | 1 | | Direct Acting | L32591 | 210 |
| L32591mRNA_g_at | | 1 | | Direct Acting | L32591 | 211 |
| L32601_s_at | | −1 | | Direct Acting | L32601 | 212 |
| L34049_g_at | | −1 | | Direct Acting | L34049 | 213 |
| L38482_g_at | | 1 | | Direct Acting | L38482 | 214 |
| L38615_g_at | | 1 | | Direct Acting | L38615 | 215 |
| L41275cds_s_at | | 1 | | Direct Acting | L41275 | 216 |
| L41685mRNA_at | | 1 | | Direct Acting | L41685 | 217 |
| M11266_at | | −1 | | Direct Acting | M11266 | 218 |
| M11942_s_at | | 1 | | Direct Acting | M11942 | 219 |
| M12156_at | | 1 | | Direct Acting | M12156 | 220 |
| M12919mRNA#2_at | | 1 | | Direct Acting | M12919 | 221 |
| M12919mRNA#2_g_{—} | | 1 | | Direct Acting | M12919 | 222 |
| at | | | | | | |
| M13100cds#3_f_at | | −1 | | Direct Acting | M13100 | 223 |
| M13100cds#4_f_at | | −1 | | Direct Acting | M13100 | 224 |
| M13962mRNA#2_at | | −1 | | Direct Acting | M13962 | 225 |
| M14972_i_at | | 1 | | Direct Acting | M14972 | 226 |
| M15883_g_at | | 1 | | Direct Acting | M15883 | 227 |
| M18363cds_s_at | | −1 | | Direct Acting | M18363 | 228 |
| M21842_at | | −1 | | Direct Acting | M21842 | 229 |
| M22359mRNA_s_at | | −1 | | Direct Acting | M22359 | 230 |
| M22360_s_at | | −1 | | Direct Acting | M22360 | 231 |
| M23601_at | | −1 | | Direct Acting | M23601 | 232 |
| M24067_at | | 1 | | Direct Acting | M24067 | 233 |
| M24604_at | | 1 | | Direct Acting | M24604 | 234 |
| M24604_g_at | | 1 | | Direct Acting | M24604 | 235 |
| M25157mRNA_i_at | | −1 | | Direct Acting | M25157 | 236 |
| M25490_at | | −1 | | Direct Acting | M25490 | 237 |
| M25804_at | | 1 | | Direct Acting | M25804 | 238 |
| M25804_g_at | | 1 | | Direct Acting | M25804 | 239 |
| M27158cds_at | | 1 | | Direct Acting | M27158 | 240 |
| M27207mRNA_s_at | | −1 | | Direct Acting | M27207 | 241 |
| M29249cds_at | | 1 | | Direct Acting | M29249 | 242 |
| M31837_at | | −1 | | Direct Acting | M31837 | 243 |
| M32062_at | | 1 | | Direct Acting | M32062 | 244 |
| M32062_g_at | | 1 | | Direct Acting | M32062 | 245 |
| M33962_at | | 1 | | Direct Acting | M33962 | 246 |
| M36151cds_s_at | | 1 | | Direct Acting | M36151 | 247 |
| M37828_at | | −1 | | Direct Acting | M37828 | 248 |
| M55015cds_s_at | | 1 | | Direct Acting | M55015 | 249 |
| M57728_at | | 1 | | Direct Acting | M57728 | 250 |
| M58041_s_at | | −1 | | Direct Acting | M58041 | 251 |
| M59460mRNA#2_at | | −1 | | Direct Acting | M59460 | 252 |
| M60103_at | | −1 | | Direct Acting | M60103 | 253 |
| M61219_s_at | | 1 | | Direct Acting | M61219 | 254 |
| M63282_at | | 1 | | Direct Acting | M63282 | 255 |
| M64795_f_at | | 1 | | Direct Acting | M64795 | 256 |
| M64862_at | | −1 | | Direct Acting | M64862 | 257 |
| M69246_at | | −1 | | Direct Acting | M69246 | 258 |
| M73808mRNA_at | | 1 | | Direct Acting | M73808 | 259 |
| M75168_at | | 1 | | Direct Acting | M75168 | 260 |
| M76767_s_at | | −1 | | Direct Acting | M76767 | 261 |
| M77245_at | | 1 | | Direct Acting | M77245 | 262 |
| M77479_at | | −1 | | Direct Acting | M77479 | 263 |
| M81183Exon_UTR_g_at | | −1 | | Direct Acting | M81183 | 264 |
| M81855_at | | 1 | | Direct Acting | M81855 | 265 |
| M81920_at | | 1 | | Direct Acting | M81920 | 266 |
| M83675_at | | −1 | | Direct Acting | M83675 | 267 |
| M84719_at | | −1 | | Direct Acting | M84719 | 268 |
| M89945mRNA_at | | −1 | | Direct Acting | M89945 | 269 |
| M89945mRNA_g_at | | −1 | | Direct Acting | M89945 | 270 |
| M91466_at | | −1 | | Direct Acting | M91466 | 271 |
| M91652complete_seq_at | | −1 | | Direct Acting | M91652 | 272 |
| M91652complete_seq_g_at | | −1 | | Direct Acting | M91652 | 273 |
| M93297cds_at | | −1 | | Direct Acting | M93297 | 274 |
| M93401_at | | −1 | | Direct Acting | M93401 | 275 |
| M94043_at | | −1 | | Direct Acting | M94043 | 276 |
| M94555_at | | 1 | | Direct Acting | M94555 | 277 |
| M95591_at | | −1 | | Direct Acting | M95591 | 278 |
| M95591_g_at | | −1 | | Direct Acting | M95591 | 279 |
| M96674_at | | −1 | | Direct Acting | M96674 | 280 |
| rc_AA686164_at | | 1 | | Direct Acting | AA686164 | 281 |
| rc_AA799418_at | | 1 | | Direct Acting | AA799418 | 282 |
| rc_AA799479_at | | 1 | | Direct Acting | AA799479 | 283 |
| rc_AA799481_at | | 1 | | Direct Acting | AA799481 | 284 |
| rc_AA799508_at | | 1 | | Direct Acting | AA799508 | 285 |
| rc_AA799531_at | | 1 | | Direct Acting | AA799531 | 286 |
| rc_AA799531_g_at | | 1 | | Direct Acting | AA799531 | 287 |
| rc_AA799560_at | | −1 | | Direct Acting | AA799560 | 288 |
| rc_AA799672_s_at | | 1 | | Direct Acting | AA799672 | 289 |
| rc_AA799735_at | | 1 | | Direct Acting | AA799735 | 290 |
| rc_AA799788_s_at | | 1 | | Direct Acting | AA799788 | 291 |
| rc_AA799814_at | | 1 | | Direct Acting | AA799814 | 292 |
| rc_AA799893_g_at | | 1 | | Direct Acting | AA799893 | 293 |
| rc_AA799997_at | | −1 | | Direct Acting | AA799997 | 294 |
| rc_AA800017_at | | 1 | | Direct Acting | AA800017 | 295 |
| rc_AA800169_at | | 1 | | Direct Acting | AA800169 | 296 |
| rc_AA800179_at | | 1 | | Direct Acting | AA800179 | 297 |
| rc_AA800218_at | | 1 | | Direct Acting | AA800218 | 298 |
| rc_AA800456_at | | −1 | | Direct Acting | AA800456 | 299 |
| rc_AA800738_at | | 1 | | Direct Acting | AA800738 | 300 |
| rc_AA800739_at | | 1 | | Direct Acting | AA800739 | 301 |
| rc_AA800750_f_at | | −1 | | Direct Acting | AA800750 | 302 |
| rc_AA800753_at | | 1 | | Direct Acting | AA800753 | 303 |
| rc_AA800797_at | | −1 | | Direct Acting | AA800797 | 304 |
| rc_AA800912_g_at | | 1 | | Direct Acting | AA800912 | 305 |
| rc_AA817846_at | | −1 | | Direct Acting | AA817846 | 306 |
| rc_AA817854_s_at | | −1 | | Direct Acting | AA817854 | 307 |
| rc_AA817987_f_at | | −1 | | Direct Acting | AA817987 | 308 |
| rc_AA818072_s_at | | 1 | | Direct Acting | AA818072 | 309 |
| rc_AA818122_f_at | | −1 | | Direct Acting | AA818122 | 310 |
| rc_AA818951_at | | 1 | | Direct Acting | AA818951 | 311 |
| rc_AA819776_f_at | | 1 | | Direct Acting | AA819776 | 312 |
| rc_AA849722_at | | 1 | | Direct Acting | AA849722 | 313 |
| rc_AA852004_s_at | | −1 | | Direct Acting | AA852004 | 314 |
| rc_AA858879_at | | 1 | | Direct Acting | AA858879 | 315 |
| rc_AA859648_at | | 1 | | Direct Acting | AA859648 | 316 |
| rc_AA859652_at | | 1 | | Direct Acting | AA859652 | 317 |
| rc_AA859663_at | | −1 | | Direct Acting | AA859663 | 318 |
| rc_AA859680_at | | 1 | | Direct Acting | AA859680 | 319 |
| rc_AA859680_g_at | | 1 | | Direct Acting | AA859680 | 320 |
| rc_AA859722_at | | 1 | | Direct Acting | AA859722 | 321 |
| rc_AA859980_at | | −1 | | Direct Acting | AA859980 | 322 |
| rc_AA859980_g_at | | −1 | | Direct Acting | AA859980 | 323 |
| rc_AA860030_s_at | | 1 | | Direct Acting | AA860030 | 324 |
| rc_AA866264_s_at | | −1 | | Direct Acting | AA866264 | 325 |
| rc_AA866426_at | | −1 | | Direct Acting | AA866426 | 326 |
| rc_AA874791_at | | 1 | | Direct Acting | AA874791 | 327 |
| rc_AA874802_s_at | | −1 | | Direct Acting | AA874802 | 328 |
| rc_AA874889_g_at | | 1 | | Direct Acting | AA874889 | 329 |
| rc_AA875054_at | | 1 | | Direct Acting | AA875054 | 330 |
| rc_AA875126_g_at | | 1 | | Direct Acting | AA875126 | 331 |
| rc_AA875205_at | | 1 | | Direct Acting | AA875205 | 332 |
| rc_AA875205_g_at | | 1 | | Direct Acting | AA875205 | 333 |
| rc_AA875511_at | | −1 | | Direct Acting | AA875511 | 334 |
| rc_AA875531_s_at | | −1 | | Direct Acting | AA875531 | 335 |
| rc_AA875537_at | | 1 | | Direct Acting | AA875537 | 336 |
| rc_AA875563_at | | 1 | | Direct Acting | AA875563 | 337 |
| rc_AA875620_g_at | | 1 | | Direct Acting | AA875620 | 338 |
| rc_AA891226_s_at | | 1 | | Direct Acting | AA891226 | 339 |
| rc_AA891553_at | | 1 | | Direct Acting | AA891553 | 340 |
| rc_AA891689_at | | 1 | | Direct Acting | AA891689 | 341 |
| rc_AA891689_g_at | | 1 | | Direct Acting | AA891689 | 342 |
| rc_AA891739_at | | −1 | | Direct Acting | AA891739 | 343 |
| rc_AA891785_at | | 1 | | Direct Acting | AA891785 | 344 |
| rc_AA891790_at | | 1 | | Direct Acting | AA891790 | 345 |
| rc_AA891829_at | | 1 | | Direct Acting | AA891829 | 346 |
| rc_AA891838_at | | 1 | | Direct Acting | AA891838 | 347 |
| rc_AA891998_i_at | | 1 | | Direct Acting | AA891998 | 348 |
| rc_AA892006_at | | 1 | | Direct Acting | AA892006 | 349 |
| rc_AA892010_g_at | | 1 | | Direct Acting | AA892010 | 350 |
| rc_AA892014_r_at | | 1 | | Direct Acting | AA892014 | 351 |
| rc_AA892027_at | | −1 | | Direct Acting | AA892027 | 352 |
| rc_AA892053_at | | 1 | | Direct Acting | AA892053 | 353 |
| rc_AA892120_at | | 1 | | Direct Acting | AA892120 | 354 |
| rc_AA892154_g_at | | −1 | | Direct Acting | AA892154 | 355 |
| rc_AA892248_g_at | | −1 | | Direct Acting | AA892248 | 356 |
| rc_AA892251_at | | −1 | | Direct Acting | AA892251 | 357 |
| rc_AA892333_at | | 1 | | Direct Acting | AA892333 | 358 |
| rc_AA892367_i_at | | 1 | | Direct Acting | AA892367 | 359 |
| rc_AA892378_at | | 1 | | Direct Acting | AA892378 | 360 |
| rc_AA892500_at | | −1 | | Direct Acting | AA892500 | 361 |
| rc_AA892562_at | | 1 | | Direct Acting | AA892562 | 362 |
| rc_AA892562_g_at | | 1 | | Direct Acting | AA892562 | 363 |
| rc_AA892582_s_at | | 1 | | Direct Acting | AA892582 | 364 |
| rc_AA892598_at | | 1 | | Direct Acting | AA892598 | 365 |
| rc_AA892598_g_at | | 1 | | Direct Acting | AA892598 | 366 |
| rc_AA892602_at | | 1 | | Direct Acting | AA892602 | 367 |
| rc_AA892680_at | | 1 | | Direct Acting | AA892680 | 368 |
| rc_AA892799_i_at | | 1 | | Direct Acting | AA892799 | 369 |
| rc_AA892799_r_at | | −1 | | Direct Acting | AA892799 | 370 |
| rc_AA892828_at | | −1 | | Direct Acting | AA892828 | 371 |
| rc_AA892828_g_at | | −1 | | Direct Acting | AA892828 | 372 |
| rc_AA892832_at | | −1 | | Direct Acting | AA892832 | 373 |
| rc_AA892855_at | | −1 | | Direct Acting | AA892855 | 374 |
| rc_AA892861_at | | −1 | | Direct Acting | AA892861 | 375 |
| rc_AA892950_at | | 1 | | Direct Acting | AA892950 | 376 |
| rc_AA892986_at | | −1 | | Direct Acting | AA892986 | 377 |
| rc_AA893032_at | | −1 | | Direct Acting | AA893032 | 378 |
| rc_AA893199_at | | 1 | | Direct Acting | AA893199 | 379 |
| rc_AA893235_at | | 1 | | Direct Acting | AA893235 | 380 |
| rc_AA893239_at | | −1 | | Direct Acting | AA893239 | 381 |
| rc_AA893242_g_at | | −1 | | Direct Acting | AA893242 | 382 |
| rc_AA893280_at | | 1 | | Direct Acting | AA893280 | 383 |
| rc_AA893325_at | | −1 | | Direct Acting | AA893325 | 384 |
| rc_AA893366_at | | −1 | | Direct Acting | AA893366 | 385 |
| rc_AA893384_g_at | | −1 | | Direct Acting | AA893384 | 386 |
| rc_AA893471_s_at | | −1 | | Direct Acting | AA893471 | 387 |
| rc_AA893495_at | | −1 | | Direct Acting | AA893495 | 388 |
| rc_AA893517_at | | 1 | | Direct Acting | AA893517 | 389 |
| rc_AA893532_at | | 1 | | Direct Acting | AA893532 | 390 |
| rc_AA893562_at | | 1 | | Direct Acting | AA893562 | 391 |
| rc_AA893584_at | | 1 | | Direct Acting | AA893584 | 392 |
| rc_AA893690_at | | 1 | | Direct Acting | AA893690 | 393 |
| rc_AA893770_g_at | | 1 | | Direct Acting | AA893770 | 394 |
| rc_AA894027_at | | −1 | | Direct Acting | AA894027 | 395 |
| rc_AA894086_g_at | | 1 | | Direct Acting | AA894086 | 396 |
| rc_AA894258_at | | −1 | | Direct Acting | AA894258 | 397 |
| rc_AA894298_s_at | | 1 | | Direct Acting | AA894298 | 398 |
| rc_AA900476_at | | −1 | | Direct Acting | AA900476 | 399 |
| rc_AA924267_s_at | | 1 | | Direct Acting | AA924267 | 400 |
| rc_AA924289_s_at | | −1 | | Direct Acting | AA924289 | 401 |
| rc_AA924326_s_at | | 1 | | Direct Acting | AA924326 | 402 |
| rc_AA926193_at | | −1 | | Direct Acting | AA926193 | 403 |
| rc_AA944156_s_at | | 1 | | Direct Acting | AA944156 | 404 |
| rc_AA944397_at | | 1 | | Direct Acting | AA944397 | 405 |
| rc_AA945082_at | | 1 | | Direct Acting | AA945082 | 406 |
| rc_AA945867_at | | 1 | | Direct Acting | AA945867 | 407 |
| rc_AA946532_at | | −1 | | Direct Acting | AA946532 | 408 |
| rc_AA956958_at | | 1 | | Direct Acting | AA956958 | 409 |
| rc_AA963449_s_at | | −1 | | Direct Acting | AA963449 | 410 |
| rc_AA963839_s_at | | −1 | | Direct Acting | AA963839 | 411 |
| rc_AA965147_at | | 1 | | Direct Acting | AA965147 | 412 |
| rc_AA997614_s_at | | −1 | | Direct Acting | AA997614 | 413 |
| rc_AI008074_s_at | | 1 | | Direct Acting | AI008074 | 414 |
| rc_AI008131_s_at | | 1 | | Direct Acting | AI008131 | 415 |
| rc_AI009338_at | | −1 | | Direct Acting | AI009338 | 416 |
| rc_AI009806_at | | 1 | | Direct Acting | AI009806 | 417 |
| rc_AI011998_at | | 1 | | Direct Acting | AI011998 | 418 |
| rc_AI012595_at | | 1 | | Direct Acting | AI012595 | 419 |
| rc_AI012604_at | | 1 | | Direct Acting | AI012604 | 420 |
| rc_AI013513_at | | 1 | | Direct Acting | AI013513 | 421 |
| rc_AI014091_at | | −1 | | Direct Acting | AI014091 | 422 |
| rc_AI014163_at | | 1 | | Direct Acting | AI014163 | 423 |
| rc_AI031019_g_at | | 1 | | Direct Acting | AI031019 | 424 |
| rc_AI044900_s_at | | −1 | | Direct Acting | AI044900 | 425 |
| rc_AI044985_g_at | | −1 | | Direct Acting | AI044985 | 426 |
| rc_AI045395_at | | −1 | | Direct Acting | AI045395 | 427 |
| rc_AI070295_at | | 1 | | Direct Acting | AI070295 | 428 |
| rc_AI070295_g_at | | 1 | | Direct Acting | AI070295 | 429 |
| rc_AI102103_g_at | | 1 | | Direct Acting | AI102103 | 430 |
| rc_AI105348_f_at | | 1 | | Direct Acting | AI105348 | 431 |
| rc_AI105348_i_at | | 1 | | Direct Acting | AI105348 | 432 |
| rc_AI111401_s_at | | 1 | | Direct Acting | AI111401 | 433 |
| rc_AI137790_at | | 1 | | Direct Acting | AI137790 | 434 |
| rc_AI169695_f_at | | −1 | | Direct Acting | AI169695 | 435 |
| rc_AI169735_g_at | | −1 | | Direct Acting | AI169735 | 436 |
| rc_AI170608_at | | 1 | | Direct Acting | AI170608 | 437 |
| rc_AI171966_at | | 1 | | Direct Acting | AI171966 | 438 |
| rc_AI172476_at | | 1 | | Direct Acting | AI172476 | 439 |
| rc_AI175486_at | | 1 | | Direct Acting | AI175486 | 440 |
| rc_AI175959_at | | 1 | | Direct Acting | AI175959 | 441 |
| rc_AI176488_at | | −1 | | Direct Acting | AI176488 | 442 |
| rc_AI176595_s_at | | 1 | | Direct Acting | AI176595 | 443 |
| rc_AI177161_at | | −1 | | Direct Acting | AI177161 | 444 |
| rc_AI177161_g_at | | −1 | | Direct Acting | AI177161 | 445 |
| rc_AI177986_at | | 1 | | Direct Acting | AI177986 | 446 |
| rc_AI178135_at | | 1 | | Direct Acting | AI178135 | 447 |
| rc_AI178828_i_at | | 1 | | Direct Acting | AI178828 | 448 |
| rc_AI179610_at | | 1 | | Direct Acting | AI179610 | 449 |
| rc_AI180442_at | | −1 | | Direct Acting | AI180442 | 450 |
| rc_AI228738_s_at | | 1 | | Direct Acting | AI228738 | 451 |
| rc_AI229637_at | | 1 | | Direct Acting | AI229637 | 452 |
| rc_AI230260_s_at | | 1 | | Direct Acting | AI230260 | 453 |
| rc_AI230294_at | | −1 | | Direct Acting | AI230294 | 454 |
| rc_AI230614_s_at | | 1 | | Direct Acting | AI230614 | 455 |
| rc_AI230712_at | | 1 | | Direct Acting | AI230712 | 456 |
| rc_AI231007_at | | 1 | | Direct Acting | AI231007 | 457 |
| rc_AI231807_g_at | | 1 | | Direct Acting | AI231807 | 458 |
| rc_AI232783_s_at | | −1 | | Direct Acting | AI232783 | 459 |
| rc_AI234604_s_at | | 1 | | Direct Acting | AI234604 | 460 |
| rc_AI235631_at | | 1 | | Direct Acting | AI235631 | 461 |
| rc_AI235890_s_at | | −1 | | Direct Acting | AI235890 | 462 |
| rc_AI236597_at | | 1 | | Direct Acting | AI236597 | 463 |
| rc_AI236601_at | | 1 | | Direct Acting | AI236601 | 464 |
| rc_AI237535_s_at | | 1 | | Direct Acting | AI237535 | 465 |
| rc_AI638948_at | | −1 | | Direct Acting | AI638948 | 466 |
| rc_AI638966_r_at | | −1 | | Direct Acting | AI638966 | 467 |
| rc_AI639008_at | | 1 | | Direct Acting | AI639008 | 468 |
| rc_AI639029_s_at | | 1 | | Direct Acting | AI639029 | 469 |
| rc_AI639067_at | | −1 | | Direct Acting | AI639067 | 470 |
| rc_AI639167_at | | 1 | | Direct Acting | AI639167 | 471 |
| rc_AI639185_s_at | | −1 | | Direct Acting | AI639185 | 472 |
| rc_AI639393_at | | 1 | | Direct Acting | AI639393 | 473 |
| rc_AI639488_at | | 1 | | Direct Acting | AI639488 | 474 |
| rc_AI639518_g_at | | 1 | | Direct Acting | AI639518 | 475 |
| rc_H31287_g_at | | 1 | | Direct Acting | H31287 | 476 |
| rc_H31351_at | | 1 | | Direct Acting | H31351 | 477 |
| rc_H31722_at | | 1 | | Direct Acting | H31722 | 478 |
| rc_H31976_at | | 1 | | Direct Acting | H31976 | 479 |
| rc_H31982_at | | 1 | | Direct Acting | H31982 | 480 |
| rc_H33426_at | | −1 | | Direct Acting | H33426 | 481 |
| rc_H33426_g_at | | −1 | | Direct Acting | H33426 | 482 |
| rc_H33491_at | | −1 | | Direct Acting | H33491 | 483 |
| S46785_at | | −1 | | Direct Acting | S46785 | 484 |
| S46785_g_at | | −1 | | Direct Acting | S46785 | 485 |
| S55224_s_at | | 1 | | Direct Acting | S55224 | 486 |
| S61868_g_at | | 1 | | Direct Acting | S61868 | 487 |
| S66024_at | | 1 | | Direct Acting | S66024 | 488 |
| S69874_s_at | | 1 | | Direct Acting | S69874 | 489 |
| S71021_s_at | | 1 | | Direct Acting | S71021 | 490 |
| S72506_s_at | | 1 | | Direct Acting | S72506 | 491 |
| S76054_s_at | | 1 | | Direct Acting | S76054 | 492 |
| S76489_s_at | | −1 | | Direct Acting | S76489 | 493 |
| S79213_at | | 1 | | Direct Acting | S79213 | 494 |
| S79820_at | | 1 | | Direct Acting | S79820 | 495 |
| S80456_s_at | | 1 | | Direct Acting | S80456 | 496 |
| S82820mRNA_s_at | | 1 | | Direct Acting | S82820 | 497 |
| S85184_at | | 1 | | Direct Acting | S85184 | 498 |
| S85184_g_at | | 1 | | Direct Acting | S85184 | 499 |
| U01146_s_at | | 1 | | Direct Acting | U01146 | 500 |
| U01344_at | | −1 | | Direct Acting | U01344 | 501 |
| U03390_at | | 1 | | Direct Acting | U03390 | 502 |
| U05014_g_at | | 1 | | Direct Acting | U05014 | 503 |
| U05784_s_at | | 1 | | Direct Acting | U05784 | 504 |
| U07201_at | | 1 | | Direct Acting | U07201 | 505 |
| U08141_at | | −1 | | Direct Acting | U08141 | 506 |
| U12268_at | | −1 | | Direct Acting | U12268 | 507 |
| U14746_at | | 1 | | Direct Acting | U14746 | 508 |
| U17035_s_at | | 1 | | Direct Acting | U17035 | 509 |
| U17697_s_at | | −1 | | Direct Acting | U17697 | 510 |
| U18729_at | | 1 | | Direct Acting | U18729 | 511 |
| U21101_at | | −1 | | Direct Acting | U21101 | 512 |
| U21719mRNA_s_at | | 1 | | Direct Acting | U21719 | 513 |
| U21871_at | | 1 | | Direct Acting | U21871 | 514 |
| U24174_at | | 1 | | Direct Acting | U24174 | 515 |
| U28504_at | | −1 | | Direct Acting | U28504 | 516 |
| U29873_at | | −1 | | Direct Acting | U29873 | 517 |
| U30186_at | | 1 | | Direct Acting | U30186 | 518 |
| U31777_g_at | | 1 | | Direct Acting | U31777 | 519 |
| U31866_at | | −1 | | Direct Acting | U31866 | 520 |
| U33500_g_at | | 1 | | Direct Acting | U33500 | 521 |
| U33541cds_at | | −1 | | Direct Acting | U33541 | 522 |
| U36482_g_at | | −1 | | Direct Acting | U36482 | 523 |
| U38253_at | | 1 | | Direct Acting | U38253 | 524 |
| U38253_g_at | | 1 | | Direct Acting | U38253 | 525 |
| U40004_s_at | | −1 | | Direct Acting | U40004 | 526 |
| U44948_at | | 1 | | Direct Acting | U44948 | 527 |
| U50412_at | | −1 | | Direct Acting | U50412 | 528 |
| U52530_s_at | | −1 | | Direct Acting | U52530 | 529 |
| U53873cds_at | | −1 | | Direct Acting | U53873 | 530 |
| U55815_at | | 1 | | Direct Acting | U55815 | 531 |
| U60416_at | | 1 | | Direct Acting | U60416 | 532 |
| U60882_at | | 1 | | Direct Acting | U60882 | 533 |
| U63923_at | | 1 | | Direct Acting | U63923 | 534 |
| U64705cds_f_at | | 1 | | Direct Acting | U64705 | 535 |
| U66322_at | | −1 | | Direct Acting | U66322 | 536 |
| U67915_at | | −1 | | Direct Acting | U67915 | 537 |
| U68168_at | | −1 | | Direct Acting | U68168 | 538 |
| U72349_at | | 1 | | Direct Acting | U72349 | 539 |
| U73174_at | | 1 | | Direct Acting | U73174 | 540 |
| U75210_s_at | | −1 | | Direct Acting | U75210 | 541 |
| U75405UTR#1_f_at | | −1 | | Direct Acting | U75405 | 542 |
| U75917_at | | 1 | | Direct Acting | U75917 | 543 |
| U76714_at | | 1 | | Direct Acting | U76714 | 544 |
| U77918_at | | 1 | | Direct Acting | U77918 | 545 |
| U83896_at | | 1 | | Direct Acting | U83896 | 546 |
| U84410_s_at | | −1 | | Direct Acting | U84410 | 547 |
| U88036_at | | −1 | | Direct Acting | U88036 | 548 |
| U91561_g_at | | 1 | | Direct Acting | U91561 | 549 |
| U96490_at | | 1 | | Direct Acting | U96490 | 550 |
| V01225mRNA_s_at | | −1 | | Direct Acting | V01225 | 551 |
| V01274_at | | −1 | | Direct Acting | V01274 | 552 |
| X02610_at | | 1 | | Direct Acting | X02610 | 553 |
| X02741_s_at | | 1 | | Direct Acting | X02741 | 554 |
| X04069_at | | −1 | | Direct Acting | X04069 | 555 |
| X04267_at | | 1 | | Direct Acting | X04267 | 556 |
| X05137_at | | −1 | | Direct Acting | X05137 | 557 |
| X05472cds#1_s_at | | −1 | | Direct Acting | X05472 | 558 |
| X06423_g_at | | 1 | | Direct Acting | X06423 | 559 |
| X06801cds_f_at | | 1 | | Direct Acting | X06801 | 560 |
| X07259cds_s_at | | 1 | | Direct Acting | X07259 | 561 |
| X07551cds_s_at | | 1 | | Direct Acting | X07551 | 562 |
| X07686cds_s_at | | −1 | | Direct Acting | X07686 | 563 |
| X07944exon#1- | | 1 | | Direct Acting | X07944 | 564 |
| 12_s_at | | | | | | |
| X08056cds_s_at | | −1 | | Direct Acting | X08056 | 565 |
| X12367cds_s_at | | −1 | | Direct Acting | X12367 | 566 |
| X13044_at | | 1 | | Direct Acting | X13044 | 567 |
| X13058_at | | 1 | | Direct Acting | X13058 | 568 |
| X13527cds_s_at | | −1 | | Direct Acting | X13527 | 569 |
| X14181cds_s_at | | 1 | | Direct Acting | X14181 | 570 |
| X14254cds_g_at | | 1 | | Direct Acting | X14254 | 571 |
| X15580complete_seq_s_at | | −1 | | Direct Acting | X15580 | 572 |
| X16038exon_s_at | | 1 | | Direct Acting | X16038 | 573 |
| X16043cds_at | | 1 | | Direct Acting | X16043 | 574 |
| X16044cds_s_at | | 1 | | Direct Acting | X16044 | 575 |
| X16554_at | | 1 | | Direct Acting | X16554 | 576 |
| X17053mRNA_s_at | | 1 | | Direct Acting | X17053 | 577 |
| X52619_at | | 1 | | Direct Acting | X52619 | 578 |
| X52815cds_f_at | | 1 | | Direct Acting | X52815 | 579 |
| X53581cds#3_f_at | | −1 | | Direct Acting | X53581 | 580 |
| X53588_at | | −1 | | Direct Acting | X53588 | 581 |
| X55286_at | | 1 | | Direct Acting | X55286 | 582 |
| X57432cds_s_at | | 1 | | Direct Acting | X57432 | 583 |
| X57523_at | | 1 | | Direct Acting | X57523 | 584 |
| X57523_g_at | | 1 | | Direct Acting | X57523 | 585 |
| X58465mRNA_at | | 1 | | Direct Acting | X58465 | 586 |
| X58465mRNA_g_at | | 1 | | Direct Acting | X58465 | 587 |
| X59859_i_at | | 1 | | Direct Acting | X59859 | 588 |
| X60212_i_at | | 1 | | Direct Acting | X60212 | 589 |
| X60769mRNA_at | | 1 | | Direct Acting | X60769 | 590 |
| X61296cds#2_f_at | | −1 | | Direct Acting | X61296 | 591 |
| X62086mRNA_s_at | | −1 | | Direct Acting | X62086 | 592 |
| X62145cds_at | | 1 | | Direct Acting | X62145 | 593 |
| X62295cds_s_at | | −1 | | Direct Acting | X62295 | 594 |
| X62875mRNA_g_at | | 1 | | Direct Acting | X62875 | 595 |
| X64052cds_f_at | | −1 | | Direct Acting | X64052 | 596 |
| X66870_at | | 1 | | Direct Acting | X66870 | 597 |
| X67788_at | | 1 | | Direct Acting | X67788 | 598 |
| X69903_at | | −1 | | Direct Acting | X69903 | 599 |
| X70369_s_at | | −1 | | Direct Acting | X70369 | 600 |
| X70871_at | | 1 | | Direct Acting | X70871 | 601 |
| X74565cds_g_at | | 1 | | Direct Acting | X74565 | 602 |
| X76453_at | | −1 | | Direct Acting | X76453 | 603 |
| X77235_at | | 1 | | Direct Acting | X77235 | 604 |
| X77932_at | | −1 | | Direct Acting | X77932 | 605 |
| X77934cds_at | | −1 | | Direct Acting | X77934 | 606 |
| X78327_at | | 1 | | Direct Acting | X78327 | 607 |
| X78997_at | | 1 | | Direct Acting | X78997 | 608 |
| X79081mRNA_f_at | | −1 | | Direct Acting | X79081 | 609 |
| X81448cds_at | | 1 | | Direct Acting | X81448 | 610 |
| X84210complete_seq_s_at | | −1 | | Direct Acting | X84210 | 611 |
| X89225cds_s_at | | 1 | | Direct Acting | X89225 | 612 |
| X95189_at | | −1 | | Direct Acting | X95189 | 613 |
| X95986mRNA#1_f_at | | 1 | | Direct Acting | X95986 | 614 |
| X97772_at | | 1 | | Direct Acting | X97772 | 615 |
| X97772_g_at | | 1 | | Direct Acting | X97772 | 616 |
| Y00396mRNA_at | | 1 | | Direct Acting | Y00396 | 617 |
| Y00396mRNA_g_at | | 1 | | Direct Acting | Y00396 | 618 |
| Y08355cds#2_at | | 1 | | Direct Acting | Y08355 | 619 |
| Y09333_at | | 1 | | Direct Acting | Y09333 | 620 |
| Y09365cds_s_at | | 1 | | Direct Acting | Y09365 | 621 |
| Y12635_at | | 1 | | Direct Acting | Y12635 | 622 |
| Y14933mRNA_s_at | | 1 | | Direct Acting | Y14933 | 623 |
| Y17295cds_s_at | | 1 | | Direct Acting | Y17295 | 624 |
| Z36944cds_at | | 1 | | Direct Acting | Z36944 | 625 |
| Z83757mRNA_at | | −1 | | Direct Acting | Z83757 | 626 |
| Z83757mRNA_g_at | | −1 | | Direct Acting | Z83757 | 627 |
| J03863_at | 1 | | 1 | Cholestatic/ | J03863 | 628 |
| | | | | Steatotic | | |
| J05460_s_at | 1 | | −1 | Cholestatic/ | J05460 | 629 |
| | | | | Steatotic | | |
| X13119cds_s_at | 1 | | 1 | Cholestatic/ | X13119 | 630 |
| | | | | Steatotic | | |
| AF020618_g_at | 1 | 1 | | Cholestatic/ | AF020618 | 631 |
| | | | | Direct Acting | | |
| AF039832_at | 1 | 1 | | Cholestatic/ | AF039832 | 632 |
| | | | | Direct Acting | | |
| AF086624_s_at | 1 | 1 | | Cholestatic/ | AF086624 | 633 |
| | | | | Direct Acting | | |
| AF089825_at | −1 | −1 | | Cholestatic/ | AF089825 | 634 |
| | | | | Direct Acting | | |
| D12769_g_at | 1 | 1 | | Cholestatic/ | D12769 | 635 |
| | | | | Direct Acting | | |
| D37920_at | −1 | −1 | | Cholestatic/ | D37920 | 636 |
| | | | | Direct Acting | | |
| D86580_at | 1 | −1 | | Cholestatic/ | D86580 | 637 |
| | | | | Direct Acting | | |
| J02722cds_at | 1 | 1 | | Cholestatic/ | J02722 | 638 |
| | | | | Direct Acting | | |
| J04171_at | 1 | 1 | | Cholestatic/ | J04171 | 639 |
| | | | | Direct Acting | | |
| K03041mRNA_s_at | 1 | −1 | | Cholestatic/ | K03041 | 640 |
| | | | | Direct Acting | | |
| L37333_s_at | 1 | −1 | | Cholestatic/ | L37333 | 641 |
| | | | | Direct Acting | | |
| M57507_at | −1 | −1 | | Cholestatic/ | M57507 | 642 |
| | | | | Direct Acting | | |
| M60921_at | 1 | 1 | | Cholestatic/ | M60921 | 643 |
| | | | | Direct Acting | | |
| M96548_at | 1 | 1 | | Cholestatic/ | M96548 | 644 |
| | | | | Direct Acting | | |
| rc_AA799861_g_at | −1 | 1 | | Cholestatic/ | AA799861 | 645 |
| | | | | Direct Acting | | |
| rc_AA800678_g_at | −1 | −1 | | Cholestatic/ | AA800678 | 646 |
| | | | | Direct Acting | | |
| rc_AA891944_at | −1 | −1 | | Cholestatic/ | AA891944 | 647 |
| | | | | Direct Acting | | |
| rc_AA900505_at | 1 | 1 | | Cholestatic/ | AA900505 | 648 |
| | | | | Direct Acting | | |
| rc_AI009098_at | −1 | 1 | | Cholestatic/ | AI009098 | 649 |
| | | | | Direct Acting | | |
| rc_AI112173_at | 1 | 1 | | Cholestatic/ | AI112173 | 650 |
| | | | | Direct Acting | | |
| rc_H31707_at | −1 | 1 | | Cholestatic/ | H31707 | 651 |
| | | | | Direct Acting | | |
| S61868_at | 1 | 1 | | Cholestatic/ | S61868 | 652 |
| | | | | Direct Acting | | |
| U14005exon#1_s_at | −1 | −1 | | Cholestatic/ | U14005 | 653 |
| | | | | Direct Acting | | |
| U42627_at | 1 | −1 | | Cholestatic/ | U42627 | 654 |
| | | | | Direct Acting | | |
| X07266cds_s_at | 1 | 1 | | Cholestatic/ | X07266 | 655 |
| | | | | Direct Acting | | |
| X63594cds_at | 1 | 1 | | Cholestatic/ | X63594 | 656 |
| | | | | Direct Acting | | |
| X96437mRNA_g_at | 1 | 1 | | Cholestatic/ | X96437 | 657 |
| | | | | Direct Acting | | |
| AF000942_at | −1 | | | Cholestatic | AF000942 | 658 |
| AF075382_at | 1 | | | Cholestatic | AF075382 | 659 |
| D00403_g_at | 1 | | | Cholestatic | D00403 | 660 |
| J03865mRNA_f_at | 1 | | | Cholestatic | J03865 | 661 |
| K03243mRNA_s_at | 1 | | | Cholestatic | K03243 | 662 |
| L13619_at | 1 | | | Cholestatic | L13619 | 663 |
| L13619_g_at | 1 | | | Cholestatic | L13619 | 664 |
| M11794cds#2_f_at | −1 | 1 | 1 | Cholestatic | M11794 | 665 |
| M33962_g_at | 1 | | | Cholestatic | M33962 | 666 |
| M63122_at | −1 | 1 | 1 | Cholestatic | M63122 | 667 |
| rc_AA685221_at | −1 | | | Cholestatic | AA685221 | 668 |
| rc_AA800613_at | 1 | | | Cholestatic | AA800613 | 669 |
| rc_AA866383_at | 1 | | | Cholestatic | AA866383 | 670 |
| rc_AA893192_at | 1 | | | Cholestatic | AA893192 | 671 |
| rc_AA893602_at | −1 | | | Cholestatic | AA893602 | 672 |
| rc_AA946108_at | 1 | −1 | −1 | Cholestatic | AA946108 | 673 |
| rc_AI102562_at | −1 | 1 | 1 | Cholestatic | AI102562 | 674 |
| rc_AI176456_at | −1 | 1 | 1 | Cholestatic | AI176456 | 675 |
| rc_AI176662_s_at | 1 | | | Cholestatic | AI176662 | 676 |
| rc_AI639141_at | 1 | | | Cholestatic | AI639141 | 677 |
| rc_H31118_at | 1 | | | Cholestatic | H31118 | 678 |
| U15211_g_at | −1 | | | Cholestatic | U15211 | 679 |
| X63594cds_g_at | 1 | | | Cholestatic | X63594 | 680 |

[0136] TABLE 4
Candidate Marker Genes

| # | Name | Affymetrix IDs | Acc. Numbers | Comment | SEQ ID NO |
|---|---|---|---|---|---|
| 1 | PEG-3 | AF020618_at; | AF020618 | Early cell stress | 84; |
| | | AF020618_g_at | | marker | 631 |
| 2 | GADD45 | L32591mRNA_at; | L32591; | Stress marker | 210; |
| | | L32591mRNA_g_at; | RNGADD45X | | 211 |
| | | rc_AI070295_at; | | | |
| | | rc_AI070295_g_at | | | |
| 3 | GADD153 | U30186_at | U30186 | Stress marker | 518 |
| 4 | PC3 (BTG2) | M60921_at; | M60921; | Stress marker | 643 |
| | | M60921_g_at; | | | 6 |
| | | rc_AA944156_s_at | AA944156 | | 404 |
| 5 | PC4 (IFR1) | rc_AI014163_at | AI014163 | Stress marker | 423 |
| 6 | CYP2b2 | M13234cds_f_at; | M13234; | Induced by | 741 |
| | | J00728cds_f_at | J00728 | some steatotic | |
| | | | | compounds | |
| 7 | AH- | AF082125_s_at; | AF082125; | Induced by | 109 |
| | Receptor | AF082124_s_at | AF082124 | some steatotic | |
| | | | | compounds | |
| 8 | IGFBP−1 | M58634_at | M58634 | Stress marker | 5 |
| 9 | TRAP | Z14030_at | Z14030 | Induced by | 860 |
| | | | | some direct | |
| | | | | acting | |
| | | | | compounds | |
| 10 | GAPDH | M17701_s_at | P04797 | House-keeping | |
| | | | | gene | |
| 11 | Amyloid_A4 | X07648cds_at | X07648 | Induced by | 66 |
| | | | | some steatotic | |
| | | | | compounds | |
| 12 | Glutathione | U73174_g_at | U73174 | | 540 |
| | reductase | | | | |
| 13 | Carboxyl | AB010635_s_at | AB010635 | Induced by | 40 |
| | esterase | | | some steatotic | |
| | | | | compounds | |
| 14 | CYP3A1 | D13912_s_at | D13912 | Induced by | 861 |
| | | | | some steatotic | |
| | | | | compounds | |
| 15 | CYP9B | L00320cds_f_at | L00320 | Induced by | 793 |
| | | | | some steatotic | |
| | | | | compounds | |
| 16 | UDP- | M13506_at | RNUD2A10; | Induced by | 862 |
| | glucuronosy | | M35086; | some steatotic | |
| | ltransferase | | J05482 | compounds | |
| | 2B | | | | |
| 17 | EGR1 | AF023087 | AF023087; | | 1 |
| | (Krox24) | | M18416; | | |
| | | | U7539; | | |
| | | | U75398; | | |
| | | | AI176662; | | |
| | | | RNNGFIA | | |

[0137] TABLE 5

| PCR | | | | | | | |
|---|---|---|---|---|---|---|---|
| Validation | | | | | | | |
| Treatment | Toxic | AH-R | | PC3 (BTG2) | | CYP2B2 | |
| Group | manifestation | RT-PCR | Affymetrix | RT-PCR | Affymetrix | RT-PCR | Affymetrix |
| Control, 6 H | Control | 1.0 | 1.0 | 1.0 | 1.0 | 1.0 | 1.0 |
| Ro65-7199, | Steatotic | 2.7 | 8.0 | 0.6 | 0.1 | 31.2 | 3.2 |
| 6 H | | | | | | | |
| Ro66-0074, | Non-toxic | 1.7 | 1.0 | 0.5 | 0.4 | 8.4 | −1.2 |
| 6 H | | | | | | | |
| Control, 24 H | Control | 1.0 | 1.0 | 1.0 | 1.0 | 1.0 | 1.0 |
| Ro65-7199, | Steatotic | 1.1 | 4.5 | 2.7 | 5.7 | 15.9 | 3.4 |
| 24 H | | | | | | | |
| Ro66-0074, | Non-toxic | 1.2 | 1.0 | 0.7 | 0.6 | 1.3 | 1.1 |
| 24 H | | | | | | | |
| Control, 7 D | Control | 1.0 | 1.0 | 1.0 | 1.0 | 1.0 | 1.0 |
| Ro65-7199, | Steatotic | 2.0 | 2.8 | 0.0 | 0.7 | 3.9 | 4.1 |
| 7 D | | | | | | | |

Ro66-0074: 4-(2-Bromo-6-pyrrolidin-1-yl-pyridine-4-sulfonyl)-phenylamine
Ro65-7199: (4-Amino-N-(6-bromo-1 H-indol-4-yl)-benzenesulfonamide.

[0138] TABLE 6

| Gene | Acc. | | SEQ ID | | SEQ ID |
|---|---|---|---|---|---|
| Name | Number | Forward Primer | NO | Reverse Primer | NO |
| PEG-3 | AF020618 | GCGGCTCAGATCTTTC | 830 | AGTGGTCACATCT | 831 |
| | | AAAGC | | TCGCTGAGG | |
| GADD45 | L32591; ATAACTGTCGGCGTGT | 832 | ATCCATGTAGCGA | 833 | |
| | RNGADD | ACGAGG | | CTTTCCCG | |
| | 45X | | | | |
| GADD153 | U30186 | TTTCGCCTTTGAGACA | 834 | TCACCACTCTGTT | 835 |
| | | GTGTCC | | TCCGTTTCC | |
| PC3 | M60921; | TTGGCCTAGCCAAGGT | 836 | ATAGCCCACCCTC | 837 |
| (BTG2) | AA944156 | AAAAGG | | CAAAAACG | |
| CYP2B2 | M13234; | TGCTCAAGTACCCCCA | 838 | CAAATGCCCTTTC | 839 |
| | J00728 | TCTCA | | CTGTGGA | |
| AH- | AF082125; | TTCTTTCCACCCCAAT | 840 | CTGCATGCTTCTG | 841 |
| Receptor | AF082124 | TCCC | | ATGTCTTCG | |
| IGFBP-1 | M58634 | TTCTTTCCACCCCAAT | 842 | CTGCATGCTTCTG | 843 |
| | | TCCC | | ATGTCTTCG | |
| Amyloid_ | X07648 | ACACATGGCCAGAGTT | 844 | TCTTGAATCTCCT | 845 |
| A4 | | GAAGCC | | CAGCCACGG | |
| Glutathione | U73174 | CATGATCACGTGGATT | 846 | CAACCCATCACTG | 847 |
| reductase | | ACGGC | | CTTATCCCC | |
| Carboxyl- | AB010635 | CAACATGCACCCAGCT | 848 | AGTCTTGGTCCAG | 849 |
| esterase | | ATTTCA | | AACTGCAGC | |
| CYP3A1 | D13912 | CTTTCCTTTGTCCTGC | 850 | TCAATGCTGCCCT | 851 |
| | | ATTCCC | | TGTTCTCC | |
| CYP9B | L00320 | CAACCCTTGATGACCG | 852 | CCCCAAGACAAAT | 853 |
| | | CACTA | | GTGCTTTC | |
| UDP- | RNUD2A1 | GAGCCGTCTTCTGGAT | 854 | GGTCCCAACGCTG | 855 |
| glucuronosyl | 0, | CGAGTA | | TCTTCTTTT | |
| transferase | M35086; | | | | |
| 2B | J05482 | | | | |
| EGR1 | AF023087; | CAAAGCCAAGCAAACC | 856 | TCACGATTGCACA | 857 |
| (Krox24) | M18416; | AATGG | | TGTCCAGC | |
| | U7539; | | | | |
| | U75398; | | | | |
| | AI176662; | | | | |
| | RNNGFIA | | | | |
| GAPDH | P04797 | CCCAGAACATCATCCC | 858 | ATGTAGGCCATGA | 859 |
| | | TGCATC | | CGTCCACCA | |

[0139] TABLE 7
The accession numbers refer to GenBank.

| Affymetrix ID | Discrimination | Acc Number | SEQ ID NO |
|---|---|---|---|
| J03588_at | direct acting vs all | J03588 | 681 |
| | other classes | | |
| M13100cds#2_s_at | direct acting vs all | M13100 | 682 |
| | other classes | | |
| rc_AA800054_at | direct acting vs all | AA800054 | 683 |
| | other classes | | |
| rc_AI178750_at | direct acting vs all | AI178750 | 684 |
| | other classes | | |
| X53581cds#3_f_at | direct acting vs all | X53581 | 685 |
| | other classes | | |
| X58465mRNA_g_at | direct acting vs all | X58465 | 686 |
| | other classes | | |
| D78308_g_at | steatotic vs all | D78308 | 687 |
| | other classes | | |
| K00996mRNA_s_at | steatotic vs all | K00996 | 688 |
| | other classes | | |
| M94918mRNA_f_at | steatotic vs all | M94918 | 689 |
| | other classes | | |
| rc_AA892888_g_at | steatotic vs all | AA892888 | 690 |
| | other classes | | |
| rc_AA946503_at | steatotic vs all | AA946503 | 691 |
| | other classes | | |
| U88036_at | steatotic vs all | U88036 | 692 |
| | other classes | | |
| AF038870_at | cholestatic vs all | AF038870 | 693 |
| | other classes | | |
| AF076183_at | cholestatic vs all | AF076183 | 694 |
| | other classes | | |
| D00753_at | cholestatic vs all | D00753 | 695 |
| | other classes | | |
| J00738_s_at | cholestatic vs all | J00738 | 696 |
| | other classes | | |
| J03588_at | cholestatic vs all | J03588 | 697 |
| | other classes | | |
| K01932_f_at | cholestatic vs all | K01932 | 698 |
| | other classes | | |
| L27843_s_at | cholestatic vs all | L27843 | 699 |
| | other classes | | |
| M11670_at | cholestatic vs all | M11670 | 700 |
| | other classes | | |
| M15327_at | cholestatic vs all | M15327 | 701 |
| | other classes | | |
| rc_AA799899_i_at | cholestatic vs all | AA799899 | 702 |
| | other classes | | |
| rc_AA858673_at | cholestatic vs all | AA858673 | 703 |
| | other classes | | |
| rc_AA891220_at | cholestatic vs all | AA891220 | 704 |
| | other classes | | |
| rc_AA892333_at | cholestatic vs all | AA892333 | 705 |
| | other classes | | |
| rc_AA892775_at | cholestatic vs all | AA892775 | 706 |
| | other classes | | |
| rc_AA945143_at | cholestatic vs all | AA945143 | 707 |
| | other classes | | |
| rc_AA945321_at | cholestatic vs all | AA945321 | 708 |
| | other classes | | |
| rc_AI007820_s_at | cholestatic vs all | AI007820 | 709 |
| | other classes | | |
| rc_AI104524_s_at | cholestatic vs all | AI104524 | 710 |
| | other classes | | |
| rc_AI228674_s_at | cholestatic vs all | AI228674 | 711 |
| | other classes | | |
| rc_AI232087_at | cholestatic vs all | AI232087 | 712 |
| | other classes | | |
| X15734_at | cholestatic vs all | X15734 | 713 |
| | other classes | | |
| AB008424_s_at | non-toxic vs all | AB008424 | 714 |
| | other classes | | |
| AF045464_s_at | non-toxic vs all | AF045464 | 715 |
| | other classes | | |
| D78308_at | non-toxic vs all | D78308 | 716 |
| | other classes | | |
| J01435cds#8_s_at | non-toxic vs all | J01435 | 717 |
| | other classes | | |
| K01932_f_at | non-toxic vs all | K01932 | 718 |
| | other classes | | |
| M11794cds#2_f_at | non-toxic vs all | M11794 | 719 |
| | other classes | | |
| M13100cds#2_s_at | non-toxic vs all | M13100 | 720 |
| | other classes | | |
| M20131cds_s_at | non-toxic vs all | M20131 | 721 |
| | other classes | | |
| M64733mRNA_s_at | non-toxic vs all | M64733 | 722 |
| | other classes | | |
| rc_AA800054_at | non-toxic vs all | AA800054 | 723 |
| | other classes | | |
| rcAA817964_s_at | non-toxic vs all | AA817964 | 724 |
| | other classes | | |
| rc_AA945054_s_at | non-toxic vs all | AA945054 | 725 |
| | other classes | | |
| rc_AA945169_at | non-toxic vs all | AA945169 | 726 |
| | other classes | | |
| rc_AI104679_s_at | non-toxic vs all | AI104679 | 727 |
| | other classes | | |
| rc_AI179012_s_at | non-toxic vs all | AI179012 | 728 |
| | other classes | | |
| rc_AI236795_s_at | non-toxic vs all | AI236795 | 729 |
| | other classes | | |
| S72505_f_at | non-toxic vs all | S72505 | 730 |
| | other classes | | |
| X03468_at | non-toxic vs all | X03468 | 731 |
| | other classes | | |
| X07467_at | non-toxic vs all | X07467 | 732 |
| | other classes | | |
| AB008807_g_at | controls vs all | AB008807 | 733 |
| | other classes | | |
| D00362_s_at | controls vs all | D00362 | 734 |
| | other classes | | |
| D00913_g_at | controls vs all | D00913 | 735 |
| | other classes | | |
| D25224_at | controls vs all | D25224 | 736 |
| | other classes | | |
| D25224_g_at | controls vs all | D25224 | 737 |
| | other classes | | |
| D43964_at | controls vs all | D43964 | 738 |
| | other classes | | |
| E01184cds_s_at | controls vs all | E01184 | 739 |
| | other classes | | |
| H32189_s_at | controls vs all | H32189 | 740 |
| | other classes | | |
| J00728cds_f_at | controls vs all | J00728 | 741 |
| | other classes | | |
| J02596cds_g_at | controls vs all | J02596 | 742 |
| | other classes | | |
| L37333_s_at | controls vs all | L37333 | 743 |
| | other classes | | |
| M11670_at | controls vs all | M11670 | 744 |
| | other classes | | |
| M15481_at | controls vs all | M15481 | 745 |
| | other classes | | |
| M20629_s_at | controls vs all | M20629 | 746 |
| | other classes | | |
| M28255_s_at | controls vs all | M28255 | 747 |
| | other classes | | |
| M31363mRNA_f_at | controls vs all | M31363 | 748 |
| | other classes | | |
| M58041_s_at | controls vs all | M58041 | 749 |
| | other classes | | |
| M64733mRNA_s_at | controls vs all | M64733 | 750 |
| | other classes | | |
| M76767_s_at | controls vs all | M76767 | 751 |
| | other classes | | |
| rc_AA800318_at | controls vs all | AA800318 | 752 |
| | other classes | | |
| rc_AA858673_at | controls vs all | AA858673 | 753 |
| | other classes | | |
| rc_AA860062_g_at | controls vs all | AA860062 | 754 |
| | other classes | | |
| rc_AA875107_at | controls vs all | AA875107 | 755 |
| | other classes | | |
| rc_AA891774_at | controls vs all | AA891774 | 756 |
| | other classes | | |
| rc_AA892775_at | controls vs all | AA892775 | 757 |
| | other classes | | |
| rc_AA892888_g_at | controls vs all | AA892888 | 758 |
| | other classes | | |
| rc_AA945143_at | controls vs all | AA945143 | 759 |
| | other classes | | |
| rc_AA946503_at | controls vs all | AA946503 | 760 |
| | other classes | | |
| rc_AI008641_at | controls vs all | AI008641 | 761 |
| | other classes | | |
| rc_AI011998_at | controls vs all | AI011998 | 762 |
| | other classes | | |
| rc_AI104524_s_at | controls vs all | AI104524 | 763 |
| | other classes | | |
| rc_AI136891_at | controls vs all | AI136891 | 764 |
| | other classes | | |
| rc_AI169372_g_at | controls vs all | AI169372 | 765 |
| | other classes | | |
| rc_AI172017_at | controls vs all | AI172017 | 766 |
| | other classes | | |
| rc_AI228674_s_at | controls vs all | AI228674 | 767 |
| | other classes | | |
| rc_AI232087_at | controls vs all | AI232087 | 768 |
| | other classes | | |
| S61868_g_at | controls vs all | S61868 | 769 |
| | other classes | | |
| S72505_f_at | controls vs all | S72505 | 770 |
| | other classes | | |
| S76779_s_at | controls vs all | S76779 | 771 |
| | other classes | | |
| X15096cds_s_at | controls vs all | X15096 | 772 |
| | other classes | | |
| X15512_at | controls vs all | X15512 | 773 |
| | other classes | | |
| X56325mRNA_s_at | controls vs all | X56325 | 774 |
| | other classes | | |
| X57432cds_s_at | controls vs all | X57432 | 775 |
| | other classes | | |
| X74549_at | controls vs all | X74549 | 776 |
| | other classes | | |
| X76456cds_at | controls vs all | X76456 | 777 |
| | other classes | | |
| X79081mRNA_f_at | controls vs all | X79081 | 778 |
| | other classes | | |

[0140] TABLE 8
The accession numbers refer to GenBank.

| Affymetrix ID | Discriminator | Acc Number | SEQ ID NO. |
|---|---|---|---|
| D25224g_at | direct acting vs | D25224 | 779 |
| | controls | | |
| E01184cds_s_at | direct acting vs | E01184 | 780 |
| | controls | | |
| J02585_at | direct acting vs | J02585 | 781 |
| | controls | | |
| J02597cds_s_at | direct acting vs | J02597 | 782 |
| | controls | | |
| J03588_at | direct acting vs | J03588 | 783 |
| | controls | | |
| L19998_at | direct acting vs | L19998 | 784 |
| | controls | | |
| M13100cds#2_s_at | direct acting vs | M13100 | 785 |
| | controls | | |
| M94548_at | direct acting vs | M94548 | 786 |
| | controls | | |
| rc_AA800054_at | direct acting vs | AA800054 | 787 |
| | controls | | |
| rc_AI231807_g_at | direct acting vs | AI231807 | 788 |
| | controls | | |
| S76489_s_at | direct acting vs | S76489 | 789 |
| | controls | | |
| X53581cds#3_f_at | direct acting vs | X53581 | 790 |
| | controls | | |
| X57432cds_s_at | direct acting vs | X57432 | 791 |
| | controls | | |
| X58465mRNA_g_at | direct acting vs | X58465 | 792 |
| | controls | | |
| L00320cds_f_at | steatotic vs | L00320 | 793 |
| | controls | | |
| rc_AA946503_at | steatotic vs | AA946503 | 794 |
| | controls | | |
| X56325mRNA_s_at | steatotic vs | X56325 | 795 |
| | controls | | |
| AF038870_at | cholestatic vs | AF038870 | 796 |
| | controls | | |
| AF076183_at | cholestatic vs | AF076183 | 797 |
| | controls | | |
| D89375_s_at | cholestatic vs | D89375 | 798 |
| | controls | | |
| J00738_s_at | cholestatic vs | J00738 | 799 |
| | controls | | |
| J01435cds#1_s_at | cholestatic vs | J01435 | 800 |
| | controls | | |
| J03588_at | cholestatic vs | J03588 | 801 |
| | controls | | |
| J03863_at | cholestatic vs | J03863 | 802 |
| | controls | | |
| K01932_f_at | cholestatic vs | K01932 | 803 |
| | controls | | |
| K01934mRNA#2_at | cholestatic vs | K01934 | 804 |
| | controls | | |
| L27843_s_at | cholestatic vs | L27843 | 805 |
| | controls | | |
| M10068mRNA_s_at | cholestatic vs | M10068 | 806 |
| | controls | | |
| M11670_at | cholestatic vs | M11670 | 807 |
| | controls | | |
| M13100cds#3_f_at | cholestatic vs | M13100 | 808 |
| | controls | | |
| M14775_s_at | cholestatic vs | M14775 | 809 |
| | controls | | |
| M15327_at | cholestatic vs | M15327 | 810 |
| | controls | | |
| M20629_s_at | cholestatic vs | M20629 | 811 |
| | controls | | |
| M31018_f_at | cholestatic vs | M31018 | 812 |
| | controls | | |
| M34331_g_at | cholestatic vs | M34331 | 813 |
| | controls | | |
| M57718mRNA_s_at | cholestatic vs | M57718 | 814 |
| | controls | | |
| rc_AA800318_at | cholestatic vs | AA800318 | 815 |
| | controls | | |
| rc_AA858673_at | cholestatic vs | AA858673 | 816 |
| | controls | | |
| rc_AA859372_s_at | cholestatic vs | AA859372 | 817 |
| | controls | | |
| rc_AA945143_at | cholestatic vs | AA945143 | 818 |
| | controls | | |
| rc_AA945321_at | cholestatic vs | AA945321 | 819 |
| | controls | | |
| rc_AI072634_at | cholestatic vs | AI072634 | 820 |
| | controls | | |
| rc_AI102562_at | cholestatic vs | AI102562 | 821 |
| | controls | | |
| rc_AI104524_s_at | cholestatic vs | AI104524 | 822 |
| | controls | | |
| rc_AI105448_at | cholestatic vs | AI105448 | 823 |
| | controls | | |
| rc_AI228674_s_at | cholestatic vs | AI228674 | 824 |
| | controls | | |
| S76489_s_at | cholestatic vs | S76489 | 825 |
| | controls | | |
| X04979_at | cholestatic vs | X04979 | 826 |
| | controls | | |
| X15734_at | cholestatic vs | X15734 | 827 |
| | controls | | |
| X86561cds#2_at | cholestatic vs | X86561 | 828 |
| | controls | | |
| Y07704_at | cholestatic vs | Y07704 | 829 |
| | controls | | |

[0141] TABLE 9
Regualtion of GADD-family genes assessed by RT-PCR.

[chemical structure]

[chemical structure]

Shaded cells represent significant induction (threshold usually 2-fold induction).

[0142] TABLE 10
EGR-1 induction by Tasmar and Dinitrophenol.

[chemical structure]

§: The compounds were administered to the experimental animals three times, every 12 Hours. Animals were sacrificed 3 hours after the last administration. Shaded cells represent significant induction (threshold usually 2-fold induction).

The application's sequence listing, which the Patent Office published only in electronic form, follows.

SEQUENCE LISTING (862 sequences)

SEQ ID NO: 1 - DNA, 353 bp, Rattus norvegicus (Norway rat)
tagagcgcgatgaggaaaagggctgagctgagctttggttctccagaatgtaagaagaaaaatttaaaacaaaaatctgaactctcaaaagtctatttttttaactgaaaatgtagatttatccatgttcgggagttggaatgctgtggttacctactgagtaggcggtgactttgtatgctatgaacatgaagttcattattttgtggttttattttacttcgtacttgtgtttgcttaaacaaagtgacttgtttggcttataaacacattgaatgcgctttactgcccatgggatatgtggtgtgtatccttcagaaaaattaaaaggaaaataaagaaactaactggtt

SEQ ID NO: 2 - DNA, 2496 bp, Rattus norvegicus (Norway rat)
ctgcagtcagacagattctgaaatggtttaaatagggagctacaaacaagtcaataattatctaagcctgctgtgttggtacctgagtctgagaagcacttgggaggtagaaggagaaggcatggaagttcaatagctcgttctaggtcaataataataatgggtagtaataataataatgataataataataaaatactttcaaggactcggttttacaatattcagattgcacgtaaatagttgtgccagcaggctaatagttatagaaaggcatagtcctttgcagttaaactggtgcttgtgacacctgtggcttttatatcgggcgtccttcagccagaaaaacccacagctttccgtggacttccttagtcaaaccaaatatgaccttccgtaggtcaggttaggatgcttcaggaccataccggagttggagttctggaagttcccgaggttcaaaaagcaaagaagagattgctacagcattctaaagtaaacagggcttaaccttggccgtgatctttcttctcaccctcctcgtgcctcccggttaaaaaccaccagctgtgatttaccacaaaaactgtaggcaacaaaagcaaaggacctcacgaggggtaagagacggtagatgtattttttgcaaatacattaatctgagacatgaacggaatctgcaaaactcaaaagacagagaagcctccatcctcgcaaatcactgtaatactaagtggagtcctaggtgcgtggcgcccacgtgcacataacgcgtgtggcccacctgccctgcgcactggtactctgaagtctcaccactgccccctgagccgtcacttgtccagcgaagcgcgtcactcccttcctctggactttgggcaaaaagcaaaaatcccggagtctaatccttgggagtggagcaagggggaggagcgatgtcctttccggttgtggggaaacaccctgtgctccgggaatttccctggcctggagttctggagtttcgagcataaaagggctcgccggagccctagagctgcagatcaggactcagatcctaaaccagctccagcactccagactccagccacactccaacagagcaccatggtctcagccacccgctcgcttctctgtgcagcgctgcctgtgctggccaccagccgccaagccacaggtaggtctcgccactgctgtgcgggggaggagcgacctccggtgggcgcacggcccacagtccgctgacccggtgtcttcccccttaggggcgcccgtcgccaatgagctgcgctgtcagtgcctgcagacagtggcagggattcacttcaagaacatccagagtttgaaggtgatgccgccaggaccccactgcacccaaaccgaagtcatgtgagtatctctctgctcgcgcagcttctgccactcccagagtgacccaaagcctccgcgcccctacactcatcctagcggaacttcctcacgtgggtccatccttctctcttcagagccacactcaagaatggtcgcgaggcttgccttgaccctgaagcccccatggttcagaagattgtccaaaagatgctaaagtgagttgtgactttgtgtttgtacttgggactagagtcgagcttgggaatagtggcatcagacgcctgaacgttaattatatcgaggatagtctgtgcttatctagagcctcaggaccggataagagagaaggctttgatgactctttgtaacaatgactcttttttccgtcttcaggggtgtccccaagtaatggagaaagaagatagattgcaccgatggcgtctgtctggtgaacgctggcttctgacaacactagttttacacattttacgatttctattgagggtcctatttattttatgtatttatttattccaccaagtgtgtggtttttattttacattaatatttaacgatgtggatgcgtttcatcgatggtcgttcaattccaattgtgcagtttaaagatggtaggcgttaaatatctcgttaaattaatatttattgggagaccattaagtgtcaaccactgtgctagaaggtgttgagcgggaagaagggcggcagagatgagagtctgggatcgtgttttgtgttagggtgaggaaatgtgtgagaggctatgtttgtatgttttgaaaagaatgttatttattgaaagttgtctttcatattttatggtcaacattgatgtgttgaagcttcccttggacattttatgtctagtttgtagggcacaatgcccttttatattctttaaccaatgctccttctcgtctcaggacagagaagttccaaggactgttacaaatgaaataaaaataaaagttttattaaaaaaataacatgggtgctttttgttttattcttcttgacatcgttgtttatagctaatcatgtgcctgtgctggctgaaatttcttatgacttgcttacttggggaggaacatttggtattcctgaaaa

SEQ ID NO: 3 - DNA, 1666 bp, Rattus norvegicus (Norway rat)
cggcagccgagtcggattgagctgctgcagacgccaggccactccagccagcactgccgttttcacgccccggctgcagacagctaggaggctttatctagtttgaaccaggctgctggagctcgctccttccctctctttttttccacgaggctgtttttttatttggctgcaattgcatgaaatcccaatggtgtagaccagtggcgatggatctaggagtttaccaactgagacatttttcaatttctttcttgtcgtctttgctgggaactgaaaacgcttccgtgagacttgacaatagctctggtgcaagtgtggtagctatcgacaacaaaatagagcaagctatggatctggtgaaaagccatttgatgtatgcagttagagaggaagtggaggttctgaaggagcagatcaaagaactaatagagaaaaactcccaactggagcaggagaacaatctgttgaagacactggccagtccggagcagctcgcccagtttcaggcccagctgcagactggctcccctccggctaccacgcagccacaggggaccacacagccccctgcacagccagcgtcccagggctcaggatcaaccgcatagcctgctatgccccaacagaactggctgctgctgtctgaactgaacagaccgaagagatgtgctagtgagaagccgcctccagtcacccatttcattgctgtctgcgaaagagacgtgagactcacacatgctgttctcgctttctccccagtattaagcactcatatgcttttggcttgaagaaatatactagttgagtgaattaaaggttaaacagagagtgagcatggatgtaccctgtgcaacgtggcagatgtctgaggaatggtttgattgacgctgaggaggagctctgtgccttttcaaccctccccagccgcccactctactcccaagctctggggctcgcctgcatggggctcagaaggtgggctgctcctggattttgtgttctcctctccttcccttcaaagaatttgagaggccagaaacgagactgcaaagggggggatgcagtccttttacaaaaccgacaactgtcaccaaagcttataaaacaggacagtactgtccctcttttctgaaacatcagaagacacaaaactgttagtgacacaacggtgacaggtagctgggacctaggctatcttattatgaaggttgttttgcttgttgtatatttgtgtatgtagtgtaacgaatttgtacaatagaggaccgtaactactgttaggttgtacagattgaagtttagatgttccattggctgtctgaaaaggtgtggattgtccttcctagagagatctacttaaaaactgcttcgtgacaaaaaccacacctgaagaaattttaagaatttggcacagttagtcactttgtgtcacccggaatctagctgctgagtcttgcaaagtaaaccccctgttgactgatgtcagttgagctagtgaatgaatagatggagaaacgtcagtcagttgctgaggaagtggatttcccagtaggggtttctgcagctcacctgtatagtcctgcgcatgttccccacacagaacccactgtatttacctgttctacttgtcacctttcaataaagcatatcaaatgttgatacc

SEQ ID NO: 4 - DNA, 3112 bp, Rattus norvegicus (Norway rat)
cgcagaacttggggagccgccgccgcgattcgccgccgccgccagcttccgccgccgcaagatcggcccctgccccagcctccgcggcagccctgcgtccaccacgggccgcggccaccgccagcctgggggcccacctacactccccgcagtgtgcccctgcaccccgcatgtaacccggccaacatccggcgagtgtgccctcagtagcttcggccccgggctgcgcccaccacccaacatcagctctccagctcgcacgtccgggatggcagcggccaaggccgagatgcaattgatgtctccgctgcagatctctgacccgttcggctcctttcctcactcacccaccatggacaactaccccaaactggaggagatgatgctgctgagcaacggggctccccagttcctcggtgctgccggaaccccagagggcagcggcggcaataacagcagcagcagcagcagcagcagcagcgggggcggtggtgggggcggcagcaacagcggcagcagcgctttcaatcctcaaggggagccgagcgaacaaccctacgagcacctgaccacagagtccttttctgacatcgctctgaataacgagaaggcgctggtggagacaagttatcccagccaaactacccggttgcctcccatcacctatactggccgcttctccctggagcctgcacccaacagtggcaacactttgtggcctgaaccccttttcagcctagtcagtggccttgtgagcatgaccaaccctccaacctcttcatcctcagcgccttctccagctgcttcatcgtcttcctctgcctcccagagcccacccctgagctgtgccgtgccgtccaacgacagcagtcccatttactcagctgcacccacctttcctactcccaacactgacatttttcctgagccccaaagccaggcctttcctggctctgcaggcacagccttgcagtacccgcctcctgcctaccctgccaccaagggtggtttccaggttcccatgatccctgactatctgtttccacaacaacagggagacctgagcctgggcaccccagaccagaagcccttccagggtctggagaaccgtacccagcagccttcgctcactccactatccactatcaaagccttcgccactcagtcgggctcccaggacttaaaggctcttaataacacctaccagtcccaactcatcaaacccagccgcatgcgcaagtaccccaaccggcccagcaagacacccccccatgaacgcccgtatgcttgccctgttgagtcctgcgatcgccgcttttctcgctcggatgagcttacacgccacatccgcatccatacaggccagaagcccttccagtgtcgaatctgcatgcgtaatttcagtcgtagtgaccaccttaccacccacatccgcacccacacaggcgagaagccttttgcctgtgacatttgtgggagaaagtttgccaggagtgatgaacgcaagaggcataccaaaatccacttaagacagaaggacaagaaagcagacaaaagtgtcgtggcctcctcagctgcctcttccctctcttcctacccatccccagtggctacctcctacccatcccccgccaccacctcatttccatccccagtgcccacctcttactcctctccgggctcctctacctacccgtctcctgcacacagtggcttcccatcgccctcggtggccaccacctatgcctccgtcccacctgctttccctgcccaggtcagcaccttccagtctgcaggggtcagcaactccttcagcacctcaacgggtctttcagacatgacagcaaccttttctcctaggacaattgaaatttgctaaagggaatgaaagagagcaaagggaggggagcgcgagagacaataaaggacaggagggaagaaatggcccgcaagaggggctgcctcttaggtcagatggaagatctcagagccaagtccttctagtcagtagaaggcccgttggccaccagccctttcacttagcgtccctgccctccccagtcccggtccttttgacttcagctgcctgaaacagccacgtccaagttcttcacctctatccaaaggacttgatttgcatggtattggataaaccatttcagcatcatctccaccacatgcctggcccttgctcccttcagcactagaacatcaagttggctgaaaaaaaaaatgggtctgggccctcagaaccctgccctgtatctttgtacagcatctgtgccatggattttgttttccttggggtattcttgatgtgaagataatttgcatactctattgtactatttggagttaaattctcactttgggggagggggagcaaagccaagcaaaccaatggtgatcctctattttgtgatgatcctgctgtgacattaggtttgaaacttttttttttttttgaagcagcagtcctaggtattaactggagcatgtgtcagagtgttgttccgttaattttgtaaatactgctcgactgtaactctcacatgtgacaaaatacggtttgtttggttgggttttttgttgtttttgaaaaaaaaattttttttttgcccgtccctttggtttcaaaagtttcacgtcttggtgcctttgtgtgacacaccttgccgatggctggacatgtgcaatcgtgaggggacacgctcacctctagccttaagggggtaggagtgatgtttcaggggaggctttagagcacgatgaggaagagggctgagctgagctttggttctccagaatgtaagaagaaaaatttaaaacaaaaatctgaactctcaaaagtctatttttttaactgaaaatgtagatttatccatgttcgggagttggaatgctgcggttacctactgagtaggcggtgacttttgtatgctatgaacatgaagttcattattttgtggttttattttacttcgtacttgtgtttgcttaaacaaagtgacttgtttggcttataaacacattgaatgcgctttactgcccatgggatatgtggtgtgtatccttcagaaaaattaaaaggaaaataaagaaactaactggt

SEQ ID NO: 5 - DNA, 1500 bp, Rattus norvegicus (Norway rat)
cgccgagcacaaacccagcgagcattgaacactgcacacggccatctgcccagagagctgtgaccaccacttccgctactatctactcagaaagtcgtgactactgagccactgctgcctgcccagattctcatccaccgcctgctgcgtctggttgcgatgccggagttcctaactgttgtttcttggccgttcctgatcctcctgtccttccaggttcgcgtagtcgctggagccccccagccatggcactgtgctccctgcactgctgagaggctggagctctgtccacccgtgcctgcttcgtgccccgagatttctcggcctgcgggctgtggctgctgcccgacatgtgccttgccactgggtgctgcctgtggtgtggccactgcgcgctgcgctcagggactcagctgccgtgcgctgccaggggagcctcgacctctgcatgccctcacccgtggccagggagcctgtgtactagaacctgccgcacccgccacgagcagcttgtccggttctcagcatgaagaggcaaaggctgctgtggcctctgaggatgagcttgccgagagcccagagatgacagaggaacagctgctggatagcttccacctcatggccccatcccgtgaggaccagcccatcctgtggaatgccattagcacctacagcagcatgcgggcccgggagatcactgacctcaagaaatggaaggagccctgccaacgggaactctataaagtgttagagagattagctgccgctcaacagaaagcaggagatgagatctacaaattttatctgccaaactgcaacaagaatggattttatcacagcaaacagtgcgagacatctctggatggagaagctgggctctgctggtgtgtctacccatggagtgggaagaagatccctggatctctggagaccagaggggaccccaactgccaccagtattttaatgtgcaaaactgaaagttgtttcctccctccttcttcacacaaaatatttaagtatatagtgtatttatactccggagcacaccattttatatatgtgtatatgtatatatccaggaactagtttttatactccacatgctgcttgatgtacaagtgggtttgtatttattcactctaagtttatttttttctaccctgtccttgtgctgtattaatttatataactgaagcttttctcatctccatacatgtaaatactaccatctcagctcttccagagttctgctttgaaagggcagcgcggtagtgcctagaacgagcacaagtcagtctgaggtaggggcctttcagtgggttcagggaggaaggttagccctggctcggggagacttcctcatcgaatcccacaggtctgtgtctgatgcctattggctgggaaggttccgatgttggttgtgtaatcaaagctaaacgtggaaagctgcgtcccatgcactgttaaacacacgtctggaataaaacattctacctgga

SEQ ID NO: 6 - DNA, 584 bp, Rattus norvegicus (rat)
gaaacactgggaagaagtggccttccttcaggttcagtgacactgatgagggcttctcagaaggcctcgagtctctcaaaccaaaggacagagctagagccagccagtcacccttagtgaggatccccttccccatgtctctccactgccgtggcatcccatgtcctggatttctcaattcctcagtttctactcaaaggtgctacttaccaaacactctgcccgtcccgctctccccagcttcgcacagccgtcccaggtggcttcgtctctcctgctttaaagttaactttgggcccacagacccgagagctgtgggttgaagcaaagctgtgaatcgctccagatggtccctgtgttctgtccacacacaggtccccgcctttttagaagcagcctcctggtctcatgcttaaatctgttcctcactgcccgtgttcactttagaaatggcagaaccacagagctggactgttgagcaggcctgtctctctcattaaatagaaataagtaagtttgtaagctattccgacagaagagacaaaggttactgattgtacaatagcgcttttatatggaagact

SEQ ID NO: 7 - DNA, 446 bp, Rattus sp.
aaatagattcaataaaaagtcaaacacacacacaaacacatcttaaaatagactttagacacgaagtgcgtgtttcttctccacagtactgtgcagagggggagggcagggggcggaggttcctccctagtatccccacaggctgagtaccaggcggcggggccagctccgccgcgacaacccccttctcccctccctgttaaatacacaaatatattatattcaatatgaattcagtctctttccagaaaaaaaaaacatacaaaatacgctggaagggggccatgtaaacctcgaggtggaaggactgggcgcaggcgggcaggccagagtccagtgtgtgagctgcgccccagacctctgggcgagtgcccatcgcctgcccccctcaccccagtggggggcgggcgcccagccttcaaggctgggggtgtccgtatggagca

SEQ ID NO: 8 - DNA, 434 bp, Rattus sp.
aaaacataactgagctaatatttttcaaaggattgtaagaagacaatgacttaaaaagaaaataaattttctgttatactaatacatagtgaacttatcaagctactgtaatactgtaaatagtcatgcttgtcaggatctttctggaaggacatggccaagcatgagagggtggggggcatccatgcagtcattctaggttagttgaggagtaggaaattgagagtacttctcgttttgatgcgaaggcttctcaaatcatgaagatcattacaaggacggccgtaagtgagatgaatgagcctatagaggagactgtatttcatgtggtgtaagcatctggataatcagagtaacgacgaggtatccccgctaatcctaggaagtgttgagggaaaaatgttatgtttacacctacaaatataatggcaaag

SEQ ID NO: 9 - DNA, 384 bp, Rattus norvegicus (Norway rat)
  misc_feature (153)..(153): n
  misc_feature (219)..(219): n
cggccgccattctcgcctgctggttccttggcccgaagccagctagtggccacccccttgttcactcggccagacttcgcttcgtactccacggccacggcacagatgtgcacggagttggggtggaccttggaggatgaggcaatggagtantatcgggcctgcaggcgtggcagcagctcacacaggtggtcgatgggtggccgcagtgatgggtantcttggaggatggctaggatgtgcctccgggcttccaccacccagctcaggtacagctccttgccctcgcctgaggatgacgccatcttgtgcaggtgctcctgctccgagggctctgaggcgtactgtgccagttcgtagagcacattggtgcgtggcgggtta

SEQ ID NO: 10 - DNA, 590 bp, Rattus sp.
cattgtaaaacttactttaatgatttctgtgcttttccttataagaataaaacatgacagctaatcttcaatgctgaaaaccagaggatcggacaaaaatcacatttatttcaccagctctgacaggtgcagatagagaattcacaaagctccgagaccacctgacatacaaagacaagggggtggacatcagaagtggggctcctcaatttaaaaatgccccaagtaacttgaaagtcgttaagttatagtattctatgtacatcacgtaggaaatgagccaatttacaagatgctgataaagatactacaatcaaacaatccttcacagaaagaatagtcctgaactggtcaaccgcagaccaggggggtttcagtcactcgatcaccagctgatatattcactttgtgatattttcatttcaagtcaattctaaaaaacaccatgacttaaactcgaaggcagacattattgttgagaattttctgaaatggccagtgtatgtaaaaaggcttaaaaggcaacgtcaacttcagcctcgggtggcgtgaagtggtgagttgtacattaacacttcctcgggttcctg

SEQ ID NO: 11 - DNA, 393 bp, Rattus norvegicus (Norway rat)
gacacaccttgccgatggctgaacatgtgcaattcgtgagggacacgctcacttctagccttaagggggtaggagtgatgtttcaggggaggctttagagcacgatgaggaagagggctgagctgagctttggttctccagaatgtaagaagaaaaaatttaaaacaaaaatctgaactctcaaaagtctatttttttaactgaaaatgtagatttatccatgttcgggagttggaatgctgcggttacctactgagtaggcggtgacttttgtatgctatgaacatgaagttcattattttgtggttttattttacttcgtacttgtgtttgcttaaacaaagtgacttgtttggcttataaacacattgaatgcgctttactgcccatggg

SEQ ID NO: 12 - DNA, 1182 bp, Rattus norvegicus (Norway rat)
ggaagcttccccaccgcaaagcagctagacgtgcgggcagtctcagctgtccactgggagtcgccaacaccatctcttgggctccagggtcgcaatcactaccggggatctccagcaagtcttccggacccacgcgtagaggaggtggtgccaccgcgcgcaaacctggcgcggtcgtgacgtcaggactacgctagattggcaattggctggaggcatgtggcgcggacgggcactggcaggagtgattggatcagctcttaaggggcggggtctggaggcggagcatgctgccgagagcgttgaagtacggcgctccgcacagcttctcgacactcctgtctggaatcgctgtgttctaggtcagatcagacattctgtcacaatgcctgaaatcaatgccagcaatcttgatgaaaaacaggttcagcttctagcagagatgtgtattcttattgatgaaaatgacaataaaattggggctgacaccaagaaaaattgtcacctgaatgaaaacattgacaaaggactaatacatcgagctttcagtgtcttcttgtttaatactgaaaacaagctcctgttacagcagagatcggatgctaaaattacctttccaggttgtttcaccaatagttgctgtagtcatccattaaataaccccggggagctggaagaaaatgatgccatgggtgtcaaacgagcagcacagaagcgcttaaaggcggagctggggatacccttggaagaggttgatctaaatgaaatgaattatctaacaagaatttactacaaggcccaatctgatggtatctggggtgaacatgaaattgattacattttgtttctgaggaagaatgtaaccctgaatccggatcccaacgagattaaaagctattgctatgtatcaaaggaagaactcaaagaaattttgaagaaggaagccaggggcgaaattaagtttactccatggtttaagattattgcagacgcttttctctttaaatggtgggataacttaaaccatttgagtccttttgttgaccatgagaaaatacatagaatgtgaatgtgtaaatgatttgagatttttttctacctactaagaatggtttgattttgttttaaattgggctcccttgtatgacacatagatattttacaaccagaatttgttttgag

SEQ ID NO: 13 - DNA, 602 bp, Rattus norvegicus (Norway rat)
gagggcagacatttggaaaacaggcaagactttggagaaagcagaccaggtatgatggccaccttgccaccaacagcccacacttcccagcaacctgtaaacatagaggacgaagatgggatcctggatgagtatgaccagtacagcctggcccaatcttatgtcgtcggtggaggtcggaaaggacgtaccaagagagaagctgctgccaacaccaaccgccccagccctggtgggcatgagaggaagctgctgaccaagttccagaactctgaaaggaaaaaggcctggcgctgagacagagctggagatgaggccagaccacggacaccacacccagcaatggatacaggaccttggagaaattaggagttgtaagcaggacctaggcctgcttgattctttcccacctaagtgaggctctggagagggaacaccaaaaaaagcccttccggacccagctaaagggcaagttaggagcgagaagcagagggtagatgggcagagctaagaaggcacccccaaaaagaacagtgggaaaaactggatgcccttgggtggcagtaacaataaactgtacaacagtgacagcaaaaaaaaaa

SEQ ID NO: 14 - DNA, 2910 bp, Rattus norvegicus (Norway rat)
  misc_feature (1899)..(1899): n
ggcacgagctttacttatgtcacaggcataataaaacatgacttcattatataaggggctatgcttaaactgaaagagaagtaggagagagttatggagatgtgaatggacctattttgagctgtgaggctacattttaaggtacctacttagattataagcctgatgtgaactccaagagttcaataatcatgactattcatacaccttgcctgctgtgtctagcagatcaaatgaggaaacactaaccttgcggctgactgtagaaattagatcaatttagaggagtgggaacacatgtttgttatcaagagactaccatgtgtcattgtgggaataggagcagagaccttggtcctttgagattgctttcttagacataaaagggggacgctggtgagagaagcacacaagtagacatgattatttcactcctctgtctgccagatccctagagcatcagctggtgttccagcagcttgttccccgagcctcctgagtagcattatagagaggtctgttccagaaagcgaaagccagatccagctgccctcctggagcagaacaacacaatttccaggctgtccctgtggcctctccctcttccagtctgccccacttggtgtcagcgatgagctcctgcaacttcactcacgccaccttcatgcttatcggtattccaggactggaggaagctcacttttggtttggcttccccctactttccatgtacgctgtagcattgtttggaaattgcattgtggtcttcatcgtgaggacagagcggagcctgcatgcgcccatgtatctttttctctgcatgctggcagctattgatctggctttgtccacctctacaatgcccaagattctcgccctcttttggtttgactcccgggagattacttttgatgcctgtctcgcccagatgttcttcattcacgctctctcagcaattgaatctaccatcttgctggccatggcctttgaccggtatgtggctatctgccacccactgcgtcacgctgctgtgctcaacaatacagtaacagtccaaatcggcatggtggctctggtccggggatccctattctttttcccactcccactgctgatcaagcgactggccttctgccactccaatgtgctctcccactcctattgtgttcaccaggatgtgatgaagttggcctatacagacacattgcccaatgtagtctatggtctaactgccattctgctagtcatgggtgtagatgtcatgttcatctccttgtcctatttcctgattatacgagcagttctgcaattgccttccaagtctgagcgagctaaggcatttggaacctgtgtgtcacacattggtgtagtcctggctttctatgtcccactcattggcctgtcagtagtgcaccgttttggaaacagcctggatcccattgtgcatgttctcatgggcgatgtctacctgctgctgcctcctgtgatcaatcccatcatctacggtgctaagaccaaacagatcagaacacgggtgctggctatgttcaagatcagttgtgacaaggacattgaagctggaggaaacacgtgacccttaccgttctatcacccttgtcctacatggcttaatataatgattaataattcatcacaccggcctaactccagtcacccaaaagcacattagtgctttaactgaatgggacagtgaactaaagtatggtttatcttcatcatggatacaatgtgaaatatctatcatgtgttttaaagcttgtgctataaaatgagacccattgataatactaaatgaaacaactaggatttgtgatttaaactaattgtttgtgatttgaatgagatatgttgaaattactagcaactttttttattccnacttcctttgttgtaaagctatctgtaatgtttaacttctgaattgtggaacatggagctgacagtatggtagccaagggtttcctcactcatttcaatgctattattcactacccaggaacatttatgagctctaaataatatggctcatgaatgtatcatgtaacgtgttccagtccctgcgttaagtacttttcagactttctgtgatcttgctcttttcccaaggaagataccattgttgcctgccacaacatgtgacaaagactttaatgagtaaagaaactttcttgaatgttctgtgccaagattttaaattaaattggataattgaatacatttgctttaccaccatgttatattgcttcctgtttaacatctgccatctatttcctctgcctattacaaatcctgctttctctctgccgtgtgctagcatggacgtctttgtgtttgtggtaagtgattaaccctgtcctggtggagggcaacaaactgttcagcatgacagagtagctgcttcttctcatatgaacagaggagatttaaattttttagtctcttacatatccttgattgtgtcctctttgtattgtgtcctgtagctgtcaaatctcttaaatgtataacataagatattgcctgattcttgacttaggtatcaaacaacataataatttatcttaaaatgttcagtattatttttactgttttaatgttcataagtaatgttgggagacatgagtgatttcccccagtcctctttaccaacagtgcaaagggcctgccaggtatgggttgcacaactataaagatgttgaatgaacttatgtagaatattccctttgtattgagtggatgatgaaaatgttcttagattagggtattaatgacacctacaaaataatgttaatatattcgatgtacgcataatgcttaaaatgctgagatttatgtagtatgtatctgccacaataaaaaatcatttaaaataaaaaaaaaaaaaaaaaa

SEQ ID NO: 15 - DNA, 993 bp, Rattus norvegicus (Norway rat)
ggcaagggctggaatactaaaagttattcatgatgtcagactatacttggtttgaaggaataccttttcctgccttttggttttccaaagaaattctggaaaatagttgtaagaagtttgtggtaaaagaagacgacttgatcatattgacttaccccaagtcaggaacgaactggctgatcgagattgtctgcttgattcagaccaagggagatcccaagtggatccaatctatgcccatctgggatcgctcaccctggatagagactggttcaggatatgataaattaaccaaaatggaaggaccacgactcatgacctcccatcttcccatgcatcttttctccaagtctctcttcagttccaaggccaaggtgatatatctcatcagaaatcccagagatgttcttgtttctgcttattttttctggagtaagatcgccctggagaagaaaccagactcgctgggaacttacgttgaatggttcctcaaaggaaatgttgcatatggatcatggtttgagcacatccgtggctggctgtctatgagagaatgggacaacttcttggtactgtactatgaagacatgaaaaaggatacaatgggatccataaagaagatatgtgacttcctggggaaaaaattagagccagatgagctgaatttggtcctcaagtatagttccttccaagtcgtgaaagaaaacaacatgtccaattatagcctcatggagaaggaactgattcttactggttttactttcatgagaaaaggcacaactaatgactggaagaatcacttcacagtagcccaagctgaagcctttgataaagtgttccaggagaaaatggccggtttccctccagggatgttcccatgggaataaattttcaaaagttttaaatattttatgaacactgatgtttatgtttatgttgttctatgatgtctgaataactgaatgtgatcattgaataaatcctgttgtggat

SEQ ID NO: 16 - DNA, 1743 bp, Rattus norvegicus (Norway rat)
ccgtcccagcatgcagaaggacgcctcctccagcggcttcctgcccagcttccagcactttgccactcaggccatccacgtgggaccagagccggagcaatggagttcgcgtgctgtggtgctgcccatttcgctggccaccacgttcaaacaggactctccaggccagtcctcgggttttgtatacagccgctctggaaatccgacgaggaattgcttggaaaaagcagtggctgcactggatggggcaaagcactgtttgaccttcgctcggggccttgccgccaccacaacgattacccatcttttaaaagcaggagatgaagtcatttgcatggatgaagtgtatggaggcaccaacaggtacttcaggagggtggcatccgagtttggactgaagatttcttttgtggattgttccaaaaccaaattgctggaggcagcgatcacaccacagaccaagcttgtttggattgaaacacccacaaacccaaccttgaagttggccgacatcaaagcctgcgcacaaattgtccacaaacacaaagacatcattctggttgtagataacactttcatgtctgcatatttccagagacctttggctctgggtgctgatatttgtatgtgttctgccacaaaatacatgaacggccacagtgatgttgtcatgggcttagtgtctgttacttccgatgacctcaacgaacggcttcgtttcctgcagaattctctcggggcagttccttctcctttcgattgttacctctgctgccgaggcctgaagacactgcagatccggatggagaaacacttcaggaatgggatggcagtggcccgtttcctggagtctaatccccgggtagaaaaggttatttatcctgggctaccgtctcaccctcagcatgagctcgccaaacgtcagtgcacgggctgccccgggatggtcagtttctatatcaagggtactctgcagcatgctcaggtcttcctcaaaaatataaagctgtttgctctggctgagagcctgggaggatatgagagtctggctgagcttccagcaatcatgacccatgcctccgtgcctgagaaggacagagctaccctcgggatcagtgacacactgatccgactttctgtgggcctagaggatgaaaaggaccttctcgaagacctgggtcaagctttaaaggcagcgcacccttaaagttcgagtcaaagccggcattccagtgctgccatcagcagcagcagccaaggggccagaccttctgaataactggacagaccattaaggagcatctgcagaacttcgcagtgaacattttaagaccctagtgattttacagctgtaaccttacagggatcttcccttaaggactgtcttctgctaacaggttgttctgttagtatcattctgatagttttgctgtatttgtgttcaaggaagagagttgtattattttggggatcatgttgcttcttttttcctttttctttcttcggtagcctaagatatgttttaatcatgtttacaaaatttagtattgatgttttatgaagttaaattattcaatgaacggtcttaaatcaactgtaggggttttttttttgaaaaattattgaaagtggggggtctttatttaattaccataagccaaaaaaatcaaatatttggaatatctactgtgaaattctagtgattaaaggttgtacttgatacttgttgtttttcttaaatgg

SEQ ID NO: 17 - DNA, 343 bp, Rattus norvegicus (rat)
ccaaggggccagaccttctgaataactggacagaccattaaggagcatctgcagaacttcgcagtgaacattttaagaccctagtgattttacagctgtaaccttacagggatcttcccttaaggactgtcttctgctaacaggttgttctgttagtatcattctgatagttttgctgtatttgtgttcaaggaagagagttgtattattttggggatcatgttgcttcttttttcctttttctttcttcggtagcctaagatatgttttaatcatgtttacaaaatttagtattgatgttttatgaagttaaattattcaatgaacggtcttaaatcaactg

SEQ ID NO: 18 - DNA, 1213 bp, Rattus norvegicus (Norway rat)
agacagactccattctttgtgcagtgaggggctccctgcctcgttgggaggcagcgtagtaaacactgcttcggtgctccagacgcctaagggctttcgttacagcgatgccgaagcgggggaagagagcggcagcggaagacggggaagaacccaagtccgagccagagaccaagaagagtaagggggcagcaaagaaaactgagaaggaggccgcaggagagggccctgtcctgtatgaggaccctccagatcagaaaacgtcagccagtggcaaatctgccacactcaagatatgctcctggaatgtggatgggcttcgagcctggattaaaaagaaaggcttggattgggtaaaggaagaagcaccagacatcttgtgcctccaagagaccaaatgctcagagaacaaactcccggctgaactgcaagagctgcctggactcacccatcagtactggtcagctccatcagacaaagaaggatatagtggtgtgggcctactttcccgccaatgcccgctcaaagtctcttatggcattggtgaggaagaacatgatcaagaaggccgggtgattgtggctgaatttgagtcctttatcttggtaacagcctatgttccgaacgcaggaaggggtctggtaagactggagtaccgacagcgatgggatgaagccttcagaaagtttctaaaggacttggcttcccggaaacctcttgtgctgtgtggggatctcaatgtggctcatgaagaaatagaccttcgtaaccccaaaggaaacaaaaagaatgctggttttactccccaggagcgccaaggctttggggaaatgctacaggctgtaccactggctgacagcttccggcatctctaccccaacactgcctacgcttatactttctggacttacatgatgaatgcccgctctaagaatgttggttggcgccttgattactttttgctgtctcactctcttttacctgctttgtgcgacagcaagatccggtccaaggctcttggcagtgaccactgtcccatcaccctttacctagcactgtgacactcccctcaagtagcttcatgctgggaaatagcctcctctcctccaggagaccagtgcgttatctcttcttcaggtgtttactcccctctaaaccaaacttctggtttcctttaaacaatccaagtgaaataaaagtcctacttttcaac

SEQ ID NO: 19 - DNA, 1872 bp, Rattus norvegicus (Norway rat)
atgatccaaacaacggccccacccgtcaaagagagcagcttcgtggaaaagatgaagaaaacgggaaggaacattatcgtattctatggctcccagacgggaaccgctgaggagtttgccaaccggctgtccaaggatgcccaccgctacgggatgcggggcatgtccgcagaccctgaagagtatgacttggccgacctgagcagcctgcctgagatcgacaagtccctggtagtcttctgcatggccacatacggagagggcgaccccacggacaatgcgcaggacttctatgactggctgcaggagactgacgtggacctcactggggtcaagtttgctgtatttggtcttgggaacaagacctatgagcacttcaatgccatgggcaagtatgtggaccagcggctggagcagcttggcgcccagcgcatctttgagttgggccttggtgatgatgacgggaacttggaagaggatttcatcacgtggagggagcagttctggccagctgtgtgcgagttctttggggtagaagccactggggaggagtcgagcattcgccagtatgagctcgtggtccacgaagacatggacgtagccaaggtgtacacgggtgagatgggccgtctgaagagctacgagaaccagaaaccccccttcgatgctaagaatccattcctggctgctgtcaccgccaaccggaagctgaaccaaggcactgagcggcatctaatgcacctggagttggacatctcagactccaagatcaggtatgaatctggagatcacgtggctgtgtacccagccaatgactcagccctggtcaaccagattggggagatcctgggagctgacctggatgtcatcatgtctctaaacaatctcgatgaggagtcaaacaagaagcatccgttcccctgccccaccacctaccgcacggccctcacctactacctggacatcactaacccgccacgcaccaatgtgctctacgaactggcacagtacgcctcagagccctcggagcaggagcacctgcacaagatggcgtcatcctcaggcgagggcaaggagctgtacctgagctgggtggtggaagcccggaggcacatcctagccatcctccaagactacccatcactgcggccacccatcgaccacctgtgtgagctgctgccacgcctgcaggcccgatactactccattgcctcatcctccaaggtccaccccaactccgtgcacatctgtgccgtggccgtggagtacgaagcgaagtctggccgagtgaacaagggggtggccactagctggcttcgggccaaggaaccagcaggcgagaatggcggccgcgccctggtacccatgttcgtgcgcaaatctcagttccgcttgcctttcaagtccaccacacctgtcatcatggtgggccccggcactgggattgcccctttcatgggcttcatccaggaacgagcttggcttcgagagcaaggcaaggaggtgggagagacgctgctatactatggctgccggcgctcggatgaggactatctgtaccgtgaagagctagcccgcttccacaaggacggtgccctcacgcagcttaatgtggccttttcccgggagcaggcccacaaggtctatgtccagcaccttctgaagagagacagggaacacctgtggaagctgatccacgagggcggtgcccacatctatgtgtgcggggatgctcgaaatatggccaaagatgtgcaaaacacattctatgacattgtggctgagttcgggcccatggagcacacccaggctgtggactatgttaagaagctgatgaccaagggccgctactcactagatgtgtggagctag

SEQ ID NO: 20 - DNA, 4689 bp, Rattus norvegicus (Norway rat)
ctgaacacccatccggtgagacaggagggcaggtttccaagcgccgctccgccacacttgatctcagcgctgggaaagtgaagcgagcaaccgacagccacgatgccggcccacatgctccaagagatctccagttcctacacgaccaccactaccatcacagagcctccttccggaaacctgcagaatggacgagagaagatgaagaaggtgcccctctatctggaagaagacatccgtcctgaaatgagagaagatatccacgaccccagctaccaggatgaggaggggcccccgcccaagctggagtacgtctggaggaacatcatcctcatggccctgctgcacgtgggagccctgtacgggatcacactgatcccctcctccaaggtctacaccttgctctgggggatattttactaccttatcagtgccctgggcatcacagccggggctcatcgcttgtggagccacaggacttacaaggctcggctgcccctgaggatcttcctcatcattgccaacaccatggcgttccagaacgatgtatatgaatgggcccgggatcaccgcgcccaccacaagttctctgagacacacgccgaccctcacaactcccgccgtggctttttcttctctcacgtgggttggctgcttgtgcgcaaacacccggctgtcaaagagaagggcggaaagctggacatgtctgacctgaaagctgagaagctggtgatgttccagaggaggtactacaagcctggcctcctgctcatgtgcttcatcctgcccacactggtgccctggtactgctggggcgaaactttcctgcacagcctgttcgtcagcaccttcttgagatacactctggtgctcaacgccacctggctggtgaacagcgctgcccacctctatgggtatcgcccctacgacaagaacattcaatctcgggagaacatcctggtttccctggggtccgtgggcgagggcttccacaactaccatcacgccttcccctacgactactctgccagtgagtaccgctggcacatcaacttcaccacgttcttcatcgactgcatggctgccctgggcctggcttacgaccggaaaaaagtttctaaggccgctgtcttagccaggattaagagaactggagatgggagccacaagagtagctgagttctgggcttctgagttcctgttccaaaagttttctgggcagagatttaatattctgttgattaactactggataatgctatcggaatgttaatgatgcatttaaactattccggtacagtattatgagaaagctttgatcatgttttgaggtaatgcatattttaattagccaggattaaccatgccacaatacatatatatttctaagcatacatgataaatgcatatacaattgtgcacatcagctttaaataataacgatgaatttgaacattctatacagagagtattaaagccaaggaacatgctgttttgatgctagggcaagcatggtgctctttccctgtttgcactgcatccagcttcgttccttcctctgtcatcaccatcttcaggcaaatagctgaccagccactggcctgtgtccaccttccaaagcccaggcaacctttctgctttctgaaatactgatccttcctcctggatatgtctttccttgttctgaactttgagattgctggctcagacttaagatagaacaaaaaccttcctggaagttcccactggtgaacttcactataggttttgccagagggaatagggaaattatcttgattgtagcaagtagatcaccttgagagaagaattagcacgcacggtgtggtttgtaagtaaggatgggagagagctaggaaaaggtggccatatctaatggcctacttaccaagcccccaggcctctctgcataggcatggagtccttccagtccatattctgaacaacagtttttagtgagatttgaataattaaattattttcagagtgaagggaatgggaaatgcatggtctgtgccaggggcggagagtggggaagggttagcttttggtaactgaagatttcttcaatggaaagactcttaatgttaaatgtgcctagaactggtaactaaacagctgacatttggagggaatgtggtgaaaactatgtaaatataagcaaaatccgcacatgaaaatatttcacttagaaaaagtgttgctaaagaaaaaaattcgaaggacaagaggtgttgcctgggttgccagtttctttcgtggcagggcaggaaatagtgaggttgagaggcagcatctgtaagtagatgctaagaggtacatttctaaatgaagcccttggggaacatctgccagggatctagagagtgctggtttcatccattgttttaatttcctccttggattgagtagaaacgtggcttcttgtggtgttgaaccttccccgacttctttgctttgttgccatctagcctgcccagcactgcctagggagcgcctacccaccctgatttcttctgccagctcctacccaccctgatttcttctgccacttctttctttggcattcatttttctttccctggacaggaagctagttacccgagtgtatcaggagcacctggcttgcctttgtccaggcccattcctcctggtatccttgggtgtggaactgctggacagcttcaggaagcagagccaggtgccacttttctgtggctccagatcctccctacctccacccctatgtgcctctgccacagtaatttcagaaaagcttggtacaccctctagcaacatcttggttcagagagtctctctggcttgtgagttaacagctcagccaaatgctgtgttgtctcagtgaggcaaccactgaacgagagggttggttgttgggctgtctctgttggagtcagagtagacaacatgttcacttcttcctgtctgctttgcaaggtgtctgtgactgatcaaggcaggcagggagtggtatagtacttctgaaaggaagaagttccctatttatctgttaaaagaccagaggcatgggcaagtgctcaggacctcacttcgggaagagggtctgcttcctgaaagccagtgtataaggaaaagcttcgactgaacctggtatctaaggtaccatgaactaacactctatcacacagcccagggcaaacagtggtatagaaaagtctagaagaaaacatcacatcagtattttagaaccatccacctttactgtccctgtagcccaatccagagcctggcttttagatctggctgcgtacagtgccaaatgctcagtttacttgtaagatcagagcctttctttctgtgttaattgaacacatgctctgagctgttttgttgaagtagaaaatctagtagaaaatcactgtagatctgatgacctggaaacctctggaaatgccttcgggtggttttatttttccaggtcacagatgcctgatttataagatgaacaatgaaatcagctttctttctcttctgatcttattccctggatttgatgcagcccatgttccaaagcaaagctacatagagacttcaggctgaggtcctggtgtctttaagcaaggacactctttcagatcctctcagaggcgtatttgtaacagtttccacatgaatgtactaatcatgttgggtgccttatcgctttcctaatctacagtgcctgttagcccagcctcactccttcccttaaccctgagatcccgtagatggagcgggtgtagacaagaggctggctggaggatcatcagtacagtgatttgcagaaatcttttatgggcttcattttggaaaaatttgtttttagtaaatgctcaaatttggtgggaagtaatttgaatgtatttgattgtattgtcctcattacaattgttaattagacacgttctacatgacagtagtactcaggggagttttctccctgggctgctaatatctgggtgtaatctctgaaactgtaggtccagtgaggcggcgtgaaaagttagcaaagccaccatctgctggtggtttaagccaaggcctctcttcttcgccactgacttgctatgttatcctttctcttgtaacaaacccatcccagagatgaggcctttaatcatcccaagaacctcctgggctaagtatctgacagtctcacatctcaacatcgtgtattaagtgtccagaacatcagctcaggaggacacgctgaaactctcactctgggcgagtcctgataaaacaggctcctaatactgacctacctcaagggcagttctgaggtgattagagccttttctttttttaagcaagtgtttggagatgcatggcagaggttttcctgcagacttgtaaagagctagatgtgttctaagaccatctttagtctacattgctcttcccagagatctacaactatgacccagccaaagtgcaagcctacctactcactgccataaaaactattcaggaaaccttttcctggcctgaatgagattttgttttttttttttttatgtggggcggttatttgtgacccaagtgtaatttggatgatttttaattaatatcaactcttgaagcctaatatgtactggatttgagattgcatttgttcctaataaaagtggatctagctgtgctgcctgg

SEQ ID NO: 21 - DNA, 2455 bp, Rattus norvegicus (Norway rat)
agagaagcagagaagcagagcaagcggcgcgttcccgaacctcgggcaagaccagcctctcccagagcatccccaccgcgaacgcacccttctccagagcataccccagcggaggccacccttccccagagcatccccgccgccaagcgcaaccttccagaagcagaccgcagcgacatggccaagaaaacagcgatcggcatcgacctgggcaccacctactcgtgcgtgggcgtgttccagcacggcaaggtggagatcatcgccaacgaccagggcaaccgcacgacccccagctacgtggccttcaccgacaccgagcggctcatcggggacgccgccaagaaccaggtggcgctgaacccgcagaacaccgtgttcgacgcgaagcggctgatcggccgcaagttcggcgacccggtggtgcagtcggacatgaagcactggcccttccaggtggtgaacgacggcgacaagcccaaggtgcaggtgaactacaagggcgagaaccggtcgttctacccggaggagatctcgtccatggtgctgaccaagatgaaggagatcgccgaggcgtacctgggccacccggtgaccaacgcggtgatcaccgtgcccgcctacttcaacgactcgcagcggcaggccaccaaggacgcgggcgtgatcgcgggtctgaacgtgctgcggatcatcaacgagcccacggcggccgccatcgcctatgggctggaccggaccggcaagggcgagcgcaacgtgctcatcttcgacctggggggcggcacgttcgacgtgtccatcctgacgatcgacgacggcatcttcgaggtgaaggccacggcgggcgacaccgacctgggcggggaggacttcgacaaccggctggtgagccacttcgtggaggagttcaagaggaagcacaagaaggacatcagccagaacaagcgcgcggtgcggcgcctgcgcacggcgtgcgagagggccaagaggacgctgtcgtccagcacccaggccagcctggagatcgactctctgttcgagggcatcgacttctacacgtccatcacgcgggcgcggttcgaggagctgtgctcggacctgttccgcggcacgctggagcccgtggagaaggccctgcgcgacgccaagctggacaaggcgcagatccacgacctggtgctggtgggcggctcgacgcgcatccccaaggtgcagaagctgctgcaggacttcttcaacgggcgcgacctgaacaagagcatcaatccggacgaggcggtggcctacggggcggcggtgcaggcggccatcctgatgggggacaagtcggagaacgtgcaggacctgctgctgctggacgtggcgccgctgtcgctgggtctggagaccgcgggcggcgtgatgacggcgctcatcaagcgcaactccaccatccccaccaagcagacgcagaccttcaccacctactcggacaaccagcccggggtgctgatccaggtgtacgagggcgagagggccatgacgcgcgacaacaacctgctggggcgcttcgagttgagcggcatcccgccggctcccaggggcgtgccccagatcgaggtgaccttcgacatcgacgccaacggcatcctgaacgtcacggccacggacaagagcaccggcaaggccaacaagatcaccatcaccaacgacaagggccgcctgagcaaggaggagatcgagcgcatggtgcaggaggccgagcgctacaaggcggaggacgaggtgcagcgcgagagggtggctgccaagaatgcgctcgagtcctacgccttcaatatgaagagcgccgtggaggacgagggtctcaagggcaagatcagcgaggctgacaagaagaaggtgctggacaagtgccaggaggtcatctcctggctggactctaacacgctggctgagaaagaggagttcgtgcacaagcgggaggagctggagcgggtgtgcaacccgatcatcagcgggctgtatcagggtgcgggtgctcccggggctgggggcttcggggcccaggcgcccaagggaggctctgggtcggggcccaccatcgaggaggtggattagaggcttttctggctctcagggtgttggctagagacagactcttgatggctgctggtgcacgattcttatcaagttactccttctctccggagttcagtttaaagttacagccttttatacggtaattgatttgagtttgttacattttgtatgctcgtgggttttttatatattcaaattaaggttgcatgttctttgcgtttaatctaagtagctgtgtaaaaatggtgtttccttcctgcgaacacctcagcactgccaccctgtgtacagttttttccttgcatccctacaaactgagaaaaaaagttatcttttgtaacttaaacattcaaaataaaatgttacaagt

SEQ ID NO: 22 - DNA, 3115 bp, Rattus sp.
gaattccggtccgcagcctaggggcggggcgcggacgacggagccatggattgcacatttgaagacatgcttcagctcatcaacaaccaagacagtgacttccctggcctatttgatgccccctatgctgggggtgagacaggagacacaggccccagcagccctggtgccagctctcctgagagcttctcttctcctgcttctctgggctcctctctggaagccttcctgggaggacccaaggtgacacctgcacccttgtcccctccaccatcggcacccactgctgtaaagatgtacccgtccgtgccccccttctcccctgggcctggaatcaaagaggagccagtgccactcaccatcctgcagcccccagcaccacagccatcgccagggaccctgttgcctccgagcttccctcctccacctgtgcagctcagccctgctcctgtgctggggtactcaagcctgccttccggcttctcaggaacccttcctgggaacacccagcagacgccatctagcctgccactgggctccacgccaggaatctcgcccacccccttacacacccaggtccagagctcggccgcccagcagccgccgccagcctcagcagcccctagaatgagcactgtggcctcacagatccagcaggtccccgttgtactgcagccacacttcatcaaggcagactcgctgctgctgacagctgtaaagacagacacaggagccacaatgaagaccgcaggcatcaacaccctggctcctgcgacagccgtgcaggcaggccccttgcagaccctggtgagtggagggaccatcctggccacagtcccactggtggtggacacagacaaactgcccatccaccgactagcagctggtggcaaggccctgggctcagctcagagccgtggtgagaagcgcacagcccacaatgccattgagaagcgctaccgttcctctatcaatgacaagattgtggagctcaaggacctggtggtgggcactgaggcaaagctgaataaatctgctgtcttgcgcaaggccatcgactacatccgcttcttacagcacagcaaccagaaactcaagcaggagaacctgaccctgcgaagtgctcacaaaagcaaatcactgaaagacctggtgtcagcttgtggcagtggaggaggcacagatgtgtctatggagggcatgaaacctgaagtggtagaaacgctgacccctccaccctcagacgccggctcaccctcccagagtagccccttgtccttgggcagcagaggcagcagcagtggtggcagtgactctgagcccgacagcccagcctttgaggataaccaggtgaaagcccagcggctgccttcacatagccgaggcatgctggacccgtcccgcctggccctgtgtgtactggtcttcctgtgtctgacctgcaacccattggcctcactgtttggctggggcatcctcactccctctgatgcttcgggtgtgcaccgtagttctgggcgcagcatgctggaggccgagagcagagatggctctaattggacccagtggttgctgccacccctagtctggctggccaatggactactagtgttggcctgcttggctcttctctttgtctacggggaacctgtgaccaggccacactccggcccggctgtacacttctggagacatcgcaaacaagctgacctggatttggcccggggagattttgcccaggccgctcaacagctgtggctggccttgcaagccctgggccggcccctgcccacctcaaacctggatctggcctgcagcctgctttggaacctcgtccgccacctgctgcagcgtctttgggtgggccgctggctggcaggccaggctgggggcctgcagagggactacaggctgagaaaggatgctcgtgccagtgcccgagatgcggctgtcgtctaccataagctgcaccagctgcatgccatgggcaagtacacaggaggccatcttgttgcttctaacctggcactgagtgcccttaacctggctgagtgtgcaggagatgctatatccatggcaacactggcagagatctacgtggcagctgccctaagggtcaaaaccagcctccccagagccttgcacttcttgacacgtttcttcctaagtagtgcccgccaggcctgcctggcacagagtggtgcagtgcctcttgccatgcagtggctctgccaccctgtaggtcaccgtttcttcgtggatggggactgggctgtacacggtgccccccaggagagtctgtacagcgtggctgggaacccagtggatccactggcccaggtgacccgactattctgtgaacatctcctggagcgagcattgaactgtatcgctcagcccagcccaggggcagctgatggacacagggagttctcagatgcccttggatatctacagttgctaaatagctgttctgacgctgtcggagctcctgcgtgcagcttctctgtcagttccagcatggctaccaccactggcacagacccagtggccaagtggtgggcctcactgacagccgtggtgatccactggctgaggcgggatgaggaggcagctgaacgcttatacccactggtagagcacattccccaagtgctgcaggaaactgagagacccttcccagggcagctctgtactccttcaaggctgcccgggctctgctggaccacagaaaggtggaatccagcccagccagcctggccatctgtgagaaggccagtgggtactgcgggacagcttagcctctacatcaactgccagttccattgacaaggccgatgcagctgctcctgtgtgatctacttcttgtggcccgcaccagcctatgcggcgccaacagtcagcagcttcagcccagggagctcacggtaccagcaatggaccccaggcctctgctctggagctgcgtggtttccaacatgacctgagcagcctgaggcgcttggcacagagcttcggcctgctatgaggagggtcttcctacatgaggccacagctcggctgatggcaggagcaagtcctgcccggacacaccagctcctggaccgcggaattc

SEQ ID NO: 23 - DNA, 1346 bp, Rattus norvegicus (Norway rat)
gaattccgggagacaaccttgtcaagcacctaattgtgccatccgtgcgatgccagccagctccatccaccttacaggagtgaagtcagcgttcatatacgctgtgtggtctggcagctgagatagtgtttcccaaagggactgtggaatgttacctcagcaggcattcatttcgcgtttggaaaatcgtctccaaatgaactttctttccgtgctgggtctgcagaacatttcagaagcggagctagcaatctgcttcaactttttttcccccggtgcttgcagcaggagatgcctgaagggagctgctgcgtggtggtctgaaacatagttcaaggaatagaggtcaactgcctagagcggtgcaggcagggcacaggctggctttgtactctgagtctcaaggtatttcccagtgcctgagccagggggaaggtggggggaggaagggaaggagctgccacttggatcgctattctgggtagccaagacagatagccatacaatggaaattagtggcttcaacttgggggaaaggatggactctaacttcgagctgtgcagttcgcccattgtttgaatggacaaaaggcagtttacccaggctcctagcatacctgcctgggtgtccaaatgtaactagatgctttcacaaaccccacccacaaaacaacacatgttcttaagtcctgggctttgttttcacttcggcctcataatacccactctgacctgctgtgtaaacgacccgggacgtaccaaaatgagcgcacctccaataaagatacacatcatgtcgtcttcacatctcttctacctggcactctgcttgctcacctttaccagctcggccacagccggaccagagaccctttgcggggctgagctggtggacgctcttcagttcgtgtgtggaccaaggggcttttacttcaacaagcccacaggctatggctccagcattcggagggcaccacagacgggcattgtggatgagtgttgcttccggagctgtgatctgaggaggctggagatgtactgtgtccgctgcaagcctacaaagtcagctcgttccatccgggcccagcgccacactgacatgcccaagactcagaaggaagtacacttgaagaacacaagtagaggaagtgcaggaaacaagacctacagaatgtaggaggagcctcccgaggaacagaaaatgccacgtcaccgcaagatcctttgctgcttgagcaacctgcaaaacatcggaacacctgccaaatatcaataatgagttcaataccatttcagagatgggcatttccctcaatgaaatacacaagtaaacattcccggaattc

SEQ ID NO: 24 - DNA, 860 bp, Rattus norvegicus (Norway rat)
gaattcagacaacaacaacagctgtgaaggccgggacccagatgtgttttcagataggcacatccttgccacggtgggagacatctttggggcgggcatagagacaactaccactgtgctcaagtggatcctggctttcctggtgcacaatcctgaggtgaagaagaagatccaaaaggagattgaccagtacgtaggcttcagccgaacaccaactttcaatgaccggtctcacctcctcatgctggaggccactatccgagaagtgctgcgtatcaggccggtggctcccatgctcatcccccacaaggctaacgtcgactccagcattggagagtttactgtccccaaggacacacatgtggtcgtcaatctctgggcactgcatcacgatgagaatgaatgggaccagccagatcagttcatgcctgaacgcttcttagatccaacgggaagccatctcattacacccacgcagagttacttgcccttcggagctggtccccgatcctgcatcggagaggctctggcccgtcaggagctctttgtcttcacggccttgctactgcagaggtttgacttggatgtgtcagatgataaacaactgccccgcctggagggtgatcccaaggtagtctttctgatcgaccctttcaaagtaaagatcacggtgcgccaggcatggatggatgcacaggctgagcttaccacctagaggccacaactaacatccccgatccatacctcaacacccacagtacaatcttagaggtgctagtcccagtgcctcctacggtcctcctccctcctacccatttctagttggcagcaatggggggtgatacacataaattaaagtt

SEQ ID NO: 25 - DNA, 3157 bp, Rattus norvegicus (Norway rat)
gttgtttcaggatgtgcttctccgtccgctccagggagcggtcacttctttgcagagcgtggtccatctccaaagtcaagcttgccccctcttgttatcccaccaagtgaaagctcgggacagcgtgaagaggatcaagttctgtgtggttttaagaaactctcagtgaatggggtgtgcgcttccacacctccacttacacccattcaaagctgctcttccccgtttccctgtgcagctccctgtgatcgcagttcccgaccgctcccaccattgcccatctctgaggacccatctctggatgaggccgactgtgaggtggaatttctaaccagtgcagatacagacttccttttagaagactgcgtgccttccgatttcaaatacgatgttcctggcaggcgaagcttccgtgggtgcggacagatcaattatgcgtattttgacagcccaactgtttctgtggcagatcttagctgtgcatctgaccagaacagagttgttccagatccaaaccctcccccgcctcaaagccatcgcagattaaggaggtctcactcaggaccagccgggtcgtttaacaagccagccatccggatatctagctgcacacacagagcctctcctagctcggatgaagacaagcctgagatcccgccccgggttcctatacctcccaggccagccaagccagactacagaaggtggtcagcagaagtgacctctaacacatacagtgatgaagataggcctcccaaagtccccccgagagaacctttgtctcggagtaactcccgtaccccaagtcctaaaagccttccgtcttacctcaatggggtcatgcctccaacacagagctttgcccccgaccccaagtatgtcagcagcaaagccctgcagagacagagcagcgaagggtctgccaaggccccctgcatcctgcccatcattgagaatgggaagaaggtcagctccacgcattattacctactacctgagagaccgccataccttgacaaatatgagaagtattttagggaagcagaagaagcaaacccaagcacccagattcagccattacctgctgcctgtggtatggtctctgccacagacaagctggcctccagaatgaaaatggatgtgggcggccacgggaagcgcaaacacttatcctacgtggtttctccgtagatatggggtcatggttcaacagaagttacatggaacggatggctgccaagtttccaatttgaggttcatagaacagtgtcaagtggcaacatgaagtggtggactctgccttggtgaggaaggcatagagccgttatgaggtgctgttgtgctgggagtccctgacctatcagcataggaagaaaaaagtatgatttaaagatgtgctagagggacacttttacatttgactacattatatacctatgtataaacgtgcggtgtaaccatagaccatagctgcaggataaccaattagtcactctagagtaatctatattcagaacaattcaaacgagctggaggcacagctccagacagtgtgaaaattgagcaaacgggagagagcagtactgttgatcagttataaatgtagagattcctggcattcaggcctgctatctagtttgttttcttccccttccctgccagcagtcttctccatacacgacagggcgtgctcttcgccaggcctgtaacgtcttgttgaaatcgttctatggcctaatacttgccgctctgggcgtttgtcttgagaggagaggacagccgtttctggaccatgttatctatcacctgtgtatgtctctcttggaaatggacagaattggtgacttttccatgctattcctgcttttcccgtccactgaagaggctttcaagagtgcagttgagtggtgctggccgtcagtgttgggtataagttttatagaccagcccagtgattagccatgattgagagttatcgtggggtgtatgggatgttgttttgtttttgagactttaaagtacaacacaagctggtcttgtgttttggttcctattcagtatttcctggggattgtttgctttttaagtgaaacacttctgaccaatagcacagaacgtcttaatgccagaggtcacttcagcatcttcctgcttagaaaactcacagctggctgcctcactgccctgagagtcagtgagacgtgtagcttgtgttcaatttttacatcctctgattgtttatcttgtatagataagcacaaagagaaggtgcttgctaacagagggacaccgctgccatgtcccaacaagctgttcagtttaaactgctgaatgacattatttgagctatttaaagcttatttttagtatgaactaaatgaaggttaaaacatgctttagaaaatgcactgatctccgcactgtgtgtacagtattggacaaaggatttgttcattttgttgcattattttgaatattgtcttttcattttaataaagttatattacttatttatgacaccgttaatgtcttgtctaaactcttatgtctcaagcaattggtgttattttttcaagcatgacagtgtttggggttcaatacatgttgaaactattgtagatttctaaatgacaatctgagcaactttacttgggtgttataaaaatgtatgggctgaagacttggtcagttgttgaagtgcttactctggacttggtcccgagtatcacgtaaacagggcatgcccataagtccagcacttgagatggtggctggagaatcagcagttcacaacgtcatctttggttcccctaggccacatgaatccctgtctcaaaaaagaaaaagaaaaaaagtatggcaaaaatcaagccttttttgctctcacctggaacaataaacagtaaacttggttctggagcttctgtggaaacagtaacacgaggaaggccaggctgtgcagtccgtaggacactctgtgtgcagacttcttgagctttaggactcagtctgggtcactctgggccctttgtgaccttcactgcttgcttgtctgaggccttaatccccgtggccaggcactgcagagagccttgcagactgctgggctgctgtatccaagctggtggccctgtgtgtcactctagcttgggaattc

SEQ ID NO: 26 - DNA, 567 bp, Rattus sp.
gatgcctgacaattggacaagtccctttctgacaacagaccattatgttgaatcctgcctgcaagacaagctgctcgaattcacttaaggagctggagggcagtgctgaagggggccaggttctcacaggacttaagccaccgctgcacattggtgggcgctgccccactgcttcccccagtctgctggagcacggaccacagcaccacatctgccacagtgagctcattcccaaccaaccacgggcttttccccaaagcggagttcatagagcggaaaacagccgctttttccttactgctcccttctctcagctgaaacatggcgatatccacccagctgtcgatgagggttaggtggacagcgttatgcttctgaccaaatagagagaacaggaagcgtgcgatgttcccttctccttcaatggggcacatcgtttgtacactgaacttcatctgtgtcttgggcacgttcttccaaatcagagtgaagcccagctgatactcgtggcgggactgttttctagcctgctccccgaagcacttgagaagattctcaggtacattc

SEQ ID NO: 27 - DNA, 583 bp, Rattus sp.
accaaaaaatattccaggtacctcttcagatagatcactttcaaaatatatttatagaccctttgccagtgctgtcatcccaaaagctgccagaactctggaagtcccgtggtccagccctcagcccaggaatataggtagagtctccatgatgggtggtaagagagcagtacctgggctgtgctggctccttctttcctcataggtaaggtatgacattaaaggacaataaatacgtgttgaatattagcaaaaaaagattacaagtcctatgctttgttgccgtggctctttgaagttcatctacctcactggcagctggaagacagttctgctgcttcgttctcagctcttggccttctgggctgtgtccacactaaaccctatggctatactgtcttgatttttcaagaattcacttaagaggaagaaagcagaaaccttagctgcaagtacattccccaatttaaattgtggtagattagtgataacatgaaaaactgagggatgatggtggtacagtcacatctccaggggccaagacatcttgcttgtgaactcagtgagtcacaggaggaaaagc

SEQ ID NO: 28 - DNA, 450 bp, Rattus sp.
aagtcaaataatttattagcacatagaaccctccagaaaaatattgccttgtggtctgttgggcaggagcaaaggcagcacctgaatgtggccatcatcttcagtgtgaacttctaagtcctagcccaggtgggtagccctcacttctcatagcttcagaatatggtattggggcaggtgggtggggcagccctgctactcattttgaacactgaagatcaggtcattccatggttatcactttaataatgtaaaactcaagcaggtgatgagctctcactcagctgtctaaatgcaccctctacctacaggagcagtgactaaggaccctttggtccccacatccctggtcggcggtggaggaagggcaggccaggcaggcatgaggcacaaacagtctttactgggttcacaccaagagtccattggtcttgaggacctctgtgaact

SEQ ID NO: 29 - DNA, 711 bp, Rattus sp.
caaactttttttttatttttttttttttttttgcgttgaaaatcatttaatgagaattatactttttctctatcagattagatctgttctagtgattattgtctggtgttacaagctcatctgtctcagagttggttagtgtgcatgaagctacttaagaaagatatggacaagcacagctcactggtccccctgagcacctcacaagactgggaacatcctctcaagggttaaaacagacgggcatacgggctgagaatttattttgaaggcaggataaacaggccagctctaagaagatactgttttgaaagctcacacgtttcataagtttctgagttcaggcagtctcagttctcatccactgagtcctgggccctcaaaagccctccaggtccaccacagaggctgttctaactgggtgctgagcctatacaaagccctggcactcacacaactgccattccccaagatcaactcgtctcctgtaaatatgtgctgtttgtatccggcacagggctgatgaagatggatcccgatggagcctactgtgcattacttcctgatgtgcagagatgtgtgtggtgagactgtgcgggatgctgggagcagtgtgcagtgcgttgggagactgagaagtgaaagccctgttggtttgaggggaaagcaaggaaatgtgacctttcccatagctactcccacagtgagaaa

SEQ ID NO: 30 - DNA, 654 bp, Rattus sp.
aactggggacatgtgtttattcagcagaaagggggagcccgttggtggggcagcgttaacacaggtggatggggagagctgatcaaataagagggatcagatgcttggtggaatcatggctggtggggcagccaggtgattctctggcaacaggaaagatggagcggcagacagacaggtgggacctgaaccatcaggccactgcacatcccagtcagccacgctcaccgtctgttcagttgtcaatgcattggtcggtgggaacagagaaaacgatgttgttatccttgaggcccagagacttggcaaagctgacgaatcgctccttcagttcatcggacagccccttggttcttccgtacagggtgactttgaagtactgtttgttttcagaggtcttctggaaaaataccatggcaaactggtcgtagtcagtgtcggccacttgcacatcgtagctctgtatctgagggtagctgtgaatattccccagggtgaactggccaggcctggagcttggaacgaatgttctgatccagtagcgacagccctggcccctgacgaggatggaagtgacgttgtagctattgtcttcctgtaactcatagatggtgctgtacatggtaaagcggctttgtctttctttctggaccg

SEQ ID NO: 31 - DNA, 421 bp, Rattus norvegicus (Norway rat)
tttttttttttttttttgccttttaaaaaataagatttattttaatttacgtgtattctggagaggactatgtacatttgagtgcagatgcctgaggcagctgaggcactggatcccctggagcttggctttcaggcagttgagtgcctgacatgggtgctgggaactgaacttgggtctttggcaagagcagtttaggctcttgaccactgagctggctccgcagcctcccacactggcctttgaagaaatactgatctaagagagcgtggttccactcagtagctcttgggtctcagtccaggtctattcccaggaggcctagtggatcctgcgggtcgtgtagtccagaaccatgctggccgcaccaagcagggccgggtcaaccaagtctgaaaccactacatccacatcctgcacg

SEQ ID NO: 32 - DNA, 644 bp, Rattus sp.
gctgtgtgatagttctttatttcaccatttaagagaaagaaagatggaggaaaggtaaacagtgttcaggcttcagcttttgccaggggaaggcttcgggtcatcgagaccccaaggtattgccaggtgcacaaatctggattccgtggcaggcaggcaaagtgatcgctctggtagcccttctcagagcccatgaggatctgatctgtccacaagcaatgactgtcactctccagtttgcaagggatggctgaacagggaaacactgtgcacaccccacagccagcactataggtctttacgaaggccttttgctgagcagggctcagattatgccagggaaccaggaagctgcaggcagtgatgtgcaaatttccgttccttaaacggcccgcgatgagaaactcctcgctgcggttctgggacttgtggacatatccacagaggctctccatggctggggtgtaggcgaaccggaaacctgtggcatttcccacagcgtcgaatcctttgagcatcttagtcatcttgatctcataacgctggtataaggtggtctcgatgatttctggggaacccatgaatttagcccttataaccaggtccgagttgcagaaagctgtctgtgggtgggttggggcaca

SEQ ID NO: 33 - DNA, 678 bp, Rattus sp.
atctcatctgtatttacctttttaaagcagaatgtgattgggcactgttattttcacattcacaagccttgctgagttacaagacctaggggaacttagggttttgttctcagtactttggaaaacaagccacttggggaattcctgtcaagttgttttagcttgtgtttacttctaagactagtacatgcagaattaactacagggaatgaaaaaaatttaagatgaaacttaagtcatcttaatttggtctactaaaggaatccagctcaacagctaaacacttcagaccacatagttaacagtaacagtaggttacattacgtcttacaacaaacgttctatcaacctcttgagtcaaacctatagtatcacagtatcacatgtagaaatttttaccttcccctagttttcatgccacacagatgttttaaatgttaacaaaaataaacaaaaatcatggaaaatatattatcagaaggaatgaaggtaagcatcaaacacatagttctggtgaagcctagtctacttcttccatgcgtgatgtgtcatcatctccttccaggggtggcatttcttcagttacagcagcactggtatcatccacagtaggatcatcctcatcaatacctagaccaagcttgatcatcctgtagatcctgttagcatcctcgtgcc

SEQ ID NO: 34 - DNA, 332 bp, Rattus sp.
atgtgtaggggggaattccttttggctaatcaaactttgtgaaaacctaggttaaattttctaatttttaattgaaccatttaaaaaaaacaaacaaaacccaaaaaattcccaaaccccaaagggaaaaaggggtctggtgagtttgagctgtcaagtctataacctgggtctgtaacactgtaacctaatagtgccctgcccatccctcctactttacactttatcccccaggtaaggggctcagcaccacagcaagcttccgtgcagcagctccactggatttcaatgcaactgagcagcagtcacgggcccctggccaaaaagttccc

SEQ ID NO: 35 - DNA, 375 bp, Rattus norvegicus (Norway rat)
ttgagctgtgaggaatctttattccctcaggtgaagcattcagagaaacagctctgagtacagaattctgggctcctctctccaacaccattctgcttcacacacaccctccaccaccggttttgcttgtgtgtgaacctatcccccagtcttcccatcctcttcttaagtcccatcattctggggcctcttctccttagcattaactgcaggctcagagacagggagtgcaatggctgacagggaaccaactaccatcctccagggccattaccttcaccggggagcaaaaggtacattgcaagtgcccaggagagcccacaggaggaagatggcatggtattctaggctctgtcacagggagagctctttgaa

SEQ ID NO: 36 - DNA, 13011 bp, Rattus norvegicus (Norway rat)
gaattccagggcatcagccaaggataaccccagtgagctcattaccccaaaaagttgggcatcagggtagttccaagaatctggatagagagtgtcctctggtaggagcatgtgctcagcttactcctcacccagtctcccacgggtgctattccccactgaccaaactctgtggaagccctgggacaaagcctttggctccttgccccaaatcagagaagaaggggccagagacagggtctggagtgaccccagatgcatggcacactctcctcaactccctggggcctcctgtcaggacaggaaagcaaaagcatgcccagctgtcagtcctggattttaatgattaactggcacttcaaacacagcctgtgccaaacaggagtcttggattccaccatcttttttctttctttcttttctttctttcttttttttttttgatatttttatttacatttcaaatgttattcccttccccggtttccctttctatgaggatgttccccctccccaaccaccccccattcctgcctctctctctctctctctctctctctcacacacacacacacacacacacacacacacacacacacactcctctgtactgggggtggggtgtgggtgtccagccttggcaggaccaagggcttcccattggtgcccaacaaagctgtcctctgctacatatgcagctgaagccatgggtctgtccatgtgtactctttgggtagtggtttagtccctggagctctggttggttggcattgttgttcatatggggtctcaagccccttcagctccttcaatcctttctctaaagggttccaccatcttaaccctacttccacacttacctcagtgaacaacagacacttctcccctcccgcctgcttgggttatatcagggccccttgaaaagccctctgtgccttttctccctacagctcctccctaattctttggctcaagagaaggcccaccttgacctggttggcctttgtgactattgtgggaggtcagaatccactggagacctcacccagtccgaagccttatgtctcacctccccaggaaagccctttgctcccctatcccaggaatacagggtgttagctatcacatcttcaaaggttggcttcagagaaagatgacttcctcctgcttgcagtacctcagcactggcagatggatgggacatttgaccccagagcaaaaccagacttctccatgttgtactccaagcactgaaagcctcccttaccagtacagctcctcattccactctgccttcccttttccaaaacacatctcacagacttctccctccccacagtgccacccaggctagcctgtcacctcccaccctgagcaactcccaagactcacctgtgtctccctaatccaccactgactccaccactgactccagccagagcaaccgtaaactttacttgaattatgtccctggcagcaatgccagttgccgctcagtgcccagctttaccatggccacgttctccctcccagcttcttctacacggaaaggtttttcttcctcagagttgtgggatatatttaacctgcagaggaatgtgtgtgtgtgtgtgtgtgtgtgtgtgtgtgtgtgtgtgtgtgtgtgtttcctctgcccctgctggtcccctctcatctttaatagtgtaggcagaatcacatcaaagagagccgcatcttcattaggaggtacctaagacacatcactgcaacgcccggcccctctacccagtaccgagatccatccctgacagcccctgccctgtttatagcatttatttatttgctagtagtctgtcccccacccctgctatactataatccacagacgggaaagtttccatctgcctgactcccactgtatcctcaaggtctgtcactggccggtgtcatagtgagaatgccacggaaggcctcccagagaacccccctgttttatcaactttgcggaacatgcaaaaccacctaagactggagtcaggaggatccccagagtagggccttctgggattcaagagagcagtaagtgccaggtggtccccttggtagtgataggggattctgcctgcaggactgcagtttaccatcatggtggtcaacaaggcaaggtcattctccctggtgctatggtatgatctccctggtgagatcgatgcccttgtgatggctgaggagatcccctgtactcaggtttccatgtgtttatccatacggctggtcaacaacaatacaagtttatgagttagtgcctaggaatgttcatggtttcatctctgggttctcagaggaacatgtgcgagaaactgagagaccctctaacctttaactaccaaagggtatccctgttttccacagcctagtccccaccttcaagctcttgttctgagaatacacctaagattctcttcaataaaatgcaaagagaaaggcattgtactgttggcaatcaaccaatctcttctctaatgatgagccaacaatgtgaatggactaatgattgatcaggaaaaaatagatgacctaggggaaggggagagatgggggccccacaacaggcagtccttgagaagggactctgtggggatggggctgcctgctgggtgtgccccttttctattctctggcttcctcagataagaccagcagttagggtacactctcctcccagtctgccgttcttgcagacacagttccacgctttggaagcatgtctgtccaggagaacactctaccccagcagctctggccgtggatctttaggtcccaaaaagacttggcaaagtctgccttaagtggggctcccggaggtaagaagaggaagggaagccactgaagagagaggagaattagggtagaatcagcgttgagagatggaggccttgtggggtaggatgcccaatatagcctcacctcggctaaatacagacctgatctgagcctttgatccaggctctgcagacaggccaaaggggatccagcagcatgggcgcacggggcactcccgtggttcctggactctggcccccagtgtacaaggcttccgttggcaagagagatgctagctggttatactttaaccaggactcatctcatctgagccaggccccatcccactgacaaaggcgcagtataaagcagacccacagacacagcaggtaagcaacgtagcagcatggaaggtgcttctaaaccgggtgctctactgagcagggctgggtcaagctacggatccagcgcagccttgaatgggtggagggaaggtggaggggaggggagtggagaaggccagagaattgcctggagctggaagaagtaaacaagaaaatgagggaaagtaagctgagtgtttgcaggcctagataatgaggtgcaggcttgaaggaggcctctgggagggctgaagctgagtggtctgcagcggtgtgacgcttggggaaggtctctgtagcttggggatagacctggatttgaatcatctcacttggctgatgcattttttttttcttagacaatgtatttttttttccccttggtctttttcttacttgtaaagtggggatagagcaggaccctggagactaaacaaagtagcgggtgtgtgatagtcaaatgggaggaagacctcgcaccatctggagatctgaatagacacagggtgcactggcaggaagcacatgggggacaggcaggtgtctgtgcaagagcctgagtttccatctacggcagggccagcgggataccttcgacgtgcgagtgtggctcaactgacccaggagctgggcactgccttcttccagcagcagcaactgccggcagctatggcggacaccttcctggaacacctctgccttctggatatcgactcacagcctgtggctgctcgtagcaccagcatcattgccaccattggtaagaccacccaagccctagaagccacacagggccacccacatggctcaggtgtctccttactttgctatccttgttgtggtcattcattcaacaaatatttgtgagatttgtgcaggggtagggggtgggtttgtttttgtttttgtttttgtttttttgagatcgggtctttttatgttgtagctctgactgatggataggcaggtctcaaatttagaaatctccctacctttgcctcctgagagttggactgggaccaccttgctccacatgaggctgggtttttgagacagggtctcaggtagccttggatatttctagcttatttcatagaccctattatatcgtcttagcctggtgaaagcataggtatgtgataccacacccaacttaacaaatgcttgttgagtacctggaaaacaaggtttggaattggggggtagactctatctcaaaaacaaataagaacgaggaaaggtgtcatctgcacacagatggccttccaaggataaggacggctgggatcacagagaagtgaaaggtatatataatgaactgaggaccagacagacacacacctaatacacacatgtcacacaacatacacacacaccacacacatacacatgcaccacacacatacacacacacaccacacatatactacatacccacacacacaccactcacatatcacacacatgtaccacacatacacacatcttgcacacacacacacaccacacacatatcactcacacatcacatacatataccacatatacacacagcacacacatacaccgtatatgcaccatatcacatacacacacaccattcacacgtcacacacacacatgcactatacacacacaccacacataacactactcacacatgacacacatatactacacatacacaaatcactcacacataccattcatacacatacatcatacacacataccacacaccactcacatatacaccacacacacaaacatgtacaggccacacacacacacacacacacacacacacacacacacacacacacaccagtcctcacacattatggctcagcatgctcagcagataaagtcttgtcatggagctgggtgacctgagttcaatccctgaaaccacatggaggattcggccacacacaccaaaaacaaaaacagaactcagtccagccaggctatgaggccctgtttcaaggagagagggtgggcagtagctctgttgttagaacacttgcctcctgcatgaagccctgggtccgtcctagcgctacataaattggctgtcgtagagtacacccttaacccagcacaggggaggacaggagaaccaagcccaaggttatccccagaagccagagcaaacccaaggctagcctgggttatgggagtccttgtctcagaaggaaggactgttattcctaaagaatgggagataaggatgggtgtagctcagtactatagcatttatttgcctcgcatgtagaaggccctggcctccatctccagagcagaaaaaaaaaatggtggccagggaagaagagggagggggaagtgcatacagcgagctgctgctgctgctgcaggctgacgtggatgaagacagggacagatctcagttctgtcagtgagattgctcagctttcaaagtgcctttttgacctgcctggcgttctgacccttcacagcctacagtaacctccacagcatacacttatgtcaggtcacttgctaacaaaggtcctgaggcctgactgagatttagacattccacaagctgccttcccaagggctgtgtactggttggagtgggggaaaaaaagagtttgtgagtagaggaacttcgaaggactcctgggtaggggagtctctccgatgttgcagatgggtttgactgtcaggcttgggaggaccttcttagtgggttctctggttccagggccagcatcccgctctgtggaccgcctcaaggagatgatcaaagcagggatgaacattgcacgactcaacttctcccatggctcccatgaggtgtggggaagaagtcatggagggtggagctgagaatgcccccaaggtcctgttcactttgccttaagatccaggttttgttctctctctctctctctctctctctctctctctctctctctctctcgctttctctctggtagtaccatgcagaatccatcgccaacatccgggaggcaactgagagttttgcaacctccccactcagctacagacctgtggccatcgccctggacaccaagggacctgagatacgaaccggagtcttgcagggggtgagaagcctttgggtccgagctgtctggggcctggaggagcatgagagccctggagcaagagagagggtccctaccctctcagggtccacttgcaaaactcaggcttctctacccaccccactcccctccagggtccggagtcggaggtggaaattgtgaagggctcacaggtgctggtgacggtggacccgaagttccagacaaggggtgatgcaaagacagtgtgggtggactaccacaatatcacccgggtcgttgcagtggggggccgcatctacattgacgacgggctcatctccttagtggtacagaaaatcggtacagaaatgcatcctgatcttatgaggcgctcccaaaaccctgaaacagggcattttctcttccctttggtttctatgttctgtcagctccttacccataccttcccctagtggtgcttgcttctccacctgtcctagtggtccctgctgtcatcatgggttggagctgagcatttgatgcctcttcttgtgtgtggagtgagtgaagggttcagaagattccaatttctggaggatccaagcttaagagttccctctgcagtgcctatatcgcagctcagccttacagacactggttctctctatacccgcaggcccagagggactggtgacagaagtggagcacggtggtatcttgggcagcaggaagggtgtgaacttgccaaacactgaggtggacctgcccgggctgtctgagcaagaccttttggatctgcgcttcggggtgcagcataatgtggacatcatctttgcctcctttgtgcggaaagccagtgacgtgttagcagtccgggatgccctggggccagaaggacagaacatcaaaattatcagcaaaatcgagaaccatgaaggcgtgaagaagtgaggcttagtctttggtccgtcagccctctgtttctctttccctctcttctgcatgatatttcctgccatctcctcctctgcctagcctggattcctccaaccaccaggtttgatgaaattctagaagtgagcgatggcatcatggtggcacggggtgacctgggcattgagatccctgcggagaaggttttcttggctcagaagatgatgattggacgctgcaacctggccggcaagcctgtcgtttgtgccacacaggtctggagcaaacccttgggctttaaaggtgctgagaaacctacatgttgctgtctggtgcctggtcacaaaagacgatgacatgaacttccagggtcttactgtgaccctggcactctaagcgtgcaggtgccagagaaatagcgtgggcgggttcgggtccccagtcagaatgtgacttctacagctttgacatccatggtgtcactcagatgctggagagcatgatcactaaggctcgaccaactcgggcggagacaagcgatgtggccaatgccgtgctggatggggctgactgtatcatgctgtccggagagaccgccaagggcagttttcctgtggaagctgtaatgatgcaacatgcggtaggtactccgttctgaaaagctgctgggccagcgacacagacccctctggaaccccgttgactactcaacctgacctactggtccctgcagattgcgcgggaggcagaggccgctgtgtaccaccgccagttgtttgaggagctacgccgggcagcgccgctgagccgtgacccaactgaggtcactgcgattggagccgtggaggcttccttcaagtgctgtgcagcagccatcatcgtgctgacgaagactggccggtgagaaacatattggaaacagggctttgggcaggggcggctgacacagaggctaataaaaaaagcactgctttagggcaagcaaagaaacagccatggatgctagaggccaggagaggctagaggcttggacaggtggctttttgatgatctagaatcagagccagtgatgggggggggggggcgcacggggacggggacgcagcaggtgataacccaagcacgttggccttagggtatttgaagaccaggctctgacagatcttcactgtgctgaggtgttgctgaaaaacccagtaggcccaagagctgaggatttttctcaaacttagtagtgagatcctaagtaattgttagggcttacaagccttgactccatggatctgtgtgagtttttcatttgtccccaccccaccccacccccatggggttgtgaggattaacaaaaaatggttaagagtcatatggaggttgggaatgatgtaaacatatcttctagacagttttaccctttttttgttgtttgtttggtaggatttttctgacatagggacttattagtcctggctggcctgaaacttccttagtacctgaagtagccttgaacttaaccctttaccccgagggctgaggttgtgggcgtgtctcaccacgcctggctggctttacatttctaattttttggaggatttattacttttatgtgtgcatgtacagttctaaggcgagaagaggttggaccctctggagctggagttacaggcagttgtaagggatttgatgtgggtgctcagaaccaactctggtcctcagaaagagcagtgcgagcctttaagaactgagccatctctctagcccaggttttacatttatctttcaatatggattgacattttgcctgcccttacgtctgagcaccatttgcatgtctggtgccagtgaaggccagaagaggatgttagagcccctgaaactggacttaaaaaccattgttagccaccatgctggtgttgaaaacgtaatcccagcgtgtgctcttaatggtgagccgtctctacatcagggtaggtcttcttactacttaatgagaaagacaaagatcagaggagtataccttacccaaggacacagggtttgttagtgacagtgacacctggaaccataattcaaactcgtttcttgggtcaacactcagagctaaccttttcttcctcatgcagttcagcccagcttctatctcaataccgacctcgggcggctgtcattgctgtgactcgatctgcccaggctgcccgacaggtccacctgtcccgaggagtcttccccttgctctaccgtgagcctccagaggccatctgggcagatgatgtggatcgaagggtccaatttggcattgaaagtggtgagccttgccctctgttccacagcctgccttcttaccccgactccaaagctctgtctgtcctcactggcccaagttttctaggaatcgctaagatggacatgtcttgggctttatttttgtttttttgtttgtttgttttttgttttttttttaaagatttattcatttattatatataagtacactgtagctgtcttcagacacaccagaagagggcatcagattctgttacagatggttgtgagccaccatgtggttgctgggatttgaactcaggacctctggaagaacagtcagtgctcttatccgctgagccatctctccagcccatgtcttgagctttaaagcaggaagggtaggctgagaggaaaggagtgagagcaggacccctgagaagtccttgctgctgtctgccacagcctagtaggacacatcagtaagaggaggttccagaagagctggaactaaattttaatttatagttgtccttgtcccattagtgcagccacatgggtgaaaaggctcaatgctgaaaaacagtatacagcatccctccacacacacatcctctcaaaccactgcctttggttcctttcccctacaggataggtagccttgaggtggtcgatgctaatggctgacccaggttcttcaatgactgtcatatttttctccaccaggaaagctccgtggtttcctccgtgtgggtgatctggtgattgtggtgacaggttggcggcctggctctggctataccaacatcatgcgggtgctgagcgtatcctgaaatgcctctccccattctgacccagttacaccctatttctttcaacccacacccctcccatagtcctacatctgccatctagccccatccctgtgctttacacagccctgaatgtctgtgtccaattatacagtggccaccggcagcatcggttgtatatccctgtctcaatccgctcagctggactctaagataccctgagcctttaatcccagcccagctggtgattcgattccttccgggtcccaatcattggaatgggggagtggaaacagggtgatcttgtccaattttcatacaatcatgattttaaaacactgtctgatataaccctcatgatcagttcctagcaaagtgtcatctcctaatggcctcaagtcagggcagaatactccttcaaggagcacagctccacactttagggaaggctggggcagctgggtactggagagaactaagacaggcggcttttctctctctctctctctctttttttttttcttttctttttctttttttcggagctggggaccgaacccagggccttgtgcttgctaggcaagcgctctaccactgagctaaatcccaaccccagcttttctctttttaatacaagctctcactggcctcaaactcctaagtcctcctgcctggccctcctaagggtagggactacaggcatgagtgaccagctggacttcgggtgccttattttcttactgactccacaaaccatggttgttctcctgcccactgctctgctgggtcagatgatccagaaattcttccacaaccacttggctcccacatacaaattagaagcaaactgaatcttttcttttaaacccaactgtttaggtgcaattataaaaacaactcccacaggcaaagaatcccagaatctcctaccctaggagatgtatagtcctggccccacccatcaatctgtagtatactcctgaagcgggacagaactggtggacaggggactcctcttgtccctaagaaagtggaggcactgttggcccacccctcctaggtttgaatactccaggccctcctcttagcaccaacagcaaatccagatgaggaaaaaaaaataagtgcagttctcctgctgccctcctcttttcactacctcaatacagcaagtttgagtattgctgctgatggcagtgtgcaaggccacaaagatgtcccccctcagccccctaccagaaggtggagaggacagaggaatgaataataaagtgaatgcgtcaaattagcaaatgaataaataaaattaataagtgactgaataagacacagggaaagataaaaggtcacatgaggattcagccccttaccccctacctgggggagctaggctagcacagtaaggaggcgccaagtatcccttagctttagggcaacaccattgagtcagggagcacagtgaagagcagcttctagtttacaaaggtagtgctttccacacaggagctgcggagggcagactacagtgggcagagatacccgttctcacgtggtgtagacaaggacggtccgtccacacgtggcagtgagagggaagatggtcacacctagggccctagacatctgttggctgtactagataattgacagtacccagctacgacaatggggatgggaagaaaggacacactgggcacaacctgcagggtcactgacagggagacagccatctagtcactcggcagtgaaggaagcagcaagtacttgtgcttaataaaggcagggctgtgggcccaagcctgcacctggcaggactgtggcctggggacaccttgttaaagggctttgagtcacttctacttggcagtggctacacattgtacttagcacaatgccttgacggggtaggcactggtacctatgacaaatgggtatgtgattaggattcgcaggctgcagctgctatgagctgaggacacagaggacaactttgtggtagtaaagggcagtgtgttagatccccgcagccttccccaggggcgtctaccctcaggcacaccttattgcgtgccaatagctaaggccagtgcaatctaggatttcacatgttggcagaaatttggggacctctgggggtaactggctcaggcactgatgacctggatggctggacagtccctggaggcttggccaggagccccaagggcagcacgctcacttccagagcctttgcgcctaggagagccatcccccgtggctcgctgaggcagagagggttgagaggcagagagtgggcggcccctaggtcctagcctccgaccacctcctcctggggagggcccaacagagacacctgggaacgccctgtccgggataggctggcatggagggttcgggcaggtggagggggagggcccaacagagacaccttgggaacccctgtccgggataggctggcatggagggttcgggcaggtggagcaggcaggcgagaagtggacgcccagggtccccgggccagcagaggacctgctcggacaggcaccagtggggaggctggggagcctgctgagcgtctagcagatcgagccaggagggtggctggagaatcaggggagaggggcagagggcctcgctgatgagtcaaggctatggccacgttggaggtcacagcagctgcctgcagaggtgcgtgtaccagtggttcccacagcactggctttccactgaggcgagctcctgtgcccggagccagaccccgaa

SEQ ID NO: 37 - DNA, 3275 bp, Rattus norvegicus (Norway rat)
cccagggtccgatcgcgtttggtgcctgaaggaggaaccggtgacagacctggagactacagttctctgtccttcacacagctctttcaccatgcctgggtcacttcctttgaatgcagaggcttgctggccaaaagatgtgggaatcgttgcccttgaaatctactttccttctcagtatgttgatcaagctgagttggaaaaatacgatggtgtagatgctggaaagtataccattggcctgggccaggccaggatgggcttctgcacggatcgcgaagacatcaactctctctgcctgactgtggttcagaaactgatggagagaaatagcctttcctatgactgcattgggcggctggaagtcgggacagagacaatcatcgacaaatcaaaatccgtgaagtctaatttgatgcagctgtttgaggagtctgggaatacagatatagaaggaatagatacaactaatgcatgctatgggggcacagccgcagtcttcaatgctgtgaactggatcgaatccagctcttgggatggacgatacgctttggtagttgcaggagacatcgctatatatgcctcaggaaacgccaggcctacaggtggagttggagctgtggctctgctaattgggccaaatgctcctgtaatttttgaccgagggcttcgtgggacacacatgcagcatgcctacgacttttacaagcctgacatgctctctgaataccctgtggtagatggaaaactctccatacagtgctacctcagcgcattggaccgctgctattctgtctaccgcaaaaagatccgggcccagtggcagaaagagggaaaggataaagattttaccctgaatgattttggcttcatgatctttcactcgccatactgtaaactggtgcagaaatctctagctaggatgttcctgaatgactttcttaacgatcaaaacagagacaaaaacagtatttacagtgggctggaagcctttggggatgtgaaattagaagatacttacttcgacagagatgtggaaaaggcatttatgaaggctagtgctgagctattcaaccagaaaacaaaggcatctttgcttgtatcgaatcaaaatggaaacatgtacacatcctctgtatacggttcccttgcttctgttctggcacagtactcacctcaacagttggccgggaagaggattggagtgttctcttacggttctggcttggctgccacactctactcccttaaagtcacacaagatgccacaccaggatctgctcttgacaaaataacagcaagtttatgtgaccttaagtcaaggcttgactcaagaacgtgtgtggcaccagacgtctttgctgaaaacatgaagctcagagaggacacacatcacttagccaactatattccccagtgttcaatagattcactcttcgaaggaacatggtatctagtcagagtggatgaaaagcacagaagaacttacgcccggcgtccctccacaaatgaccacagtttggatgaaggagtgggacttgtgcattcaaacacagctacagagcatattccaagcccggctaagaaagtgccaagacttcctgcgacctcgggcgaacctgagtcggctgtcatcagtaacggggagcactgagagccgtggccttcacagaggctcggggctggatggggtatgggaaacgttagaggaatggatgtcttgggacaattttacagattacgtgttgcttaaaaatgtaatgtaactgacacagagcccagaaaactgttgtgtttttggagaagtctcgctgagctcctaacacacttcctgctgtgggctggccaatggtgaatgtactgcgatggtgttaagggctctgcagaacgtcatacctcgctgcatgtttacacgcatgcgggttaggcttcaaactcggtctgaactgagtgcttctgactgcaaaggcagaggtactgctgtccagtttaaaaaattgttttttttttttttaatgtgtaagaatttttatacttaaataaaaaaaagtacctgtagcttttgggggaaaaaaaaaaacctttttctaggttggggattgtggaatttaaatgttacacataaactctgcttaatggcaaggcaaacatttatctttttcgaagatttataaatcctgaagagaaaaaaagagggtatggttctaggatctggatgaaccatcagtgagaaaggttagtcataatcaagtgagcagaaggatgctggcgttgagcaggcctctgtcacagcaaccagggctctgtgggcacagctgagggaactttctggccaggtgcccgtgactgctgctcagctgcactgagatgcagtggagctgctgcacggaagcttgctgtggtgctgaacgccttacctgcggataaagtgtaaagtaggagggatgggcagggcactattaggttacagtgttacagacccaggttatagacttgacagctcaaactcaccagacacctttttccctttgtggtttgtgtattttttgtgttttgtttgtttttttttatattgttcaatttaaaaaatttagaaaattttaaccttacgttttcacatagtgtgattagccaaaaggaatttcacttcaagatctagaaatagaattcataacattttttcctaaactttgacttttaaaacaacgaaaattaccacatgagatgaacaagaaaattcattagaaagttctctgggtgatttttggtgctgaactgacatgagcctcatagactgtaaaacagaggtagttgaaactaatgtacagaactacattttttaattttatttgcatttaattctgtgaagtttcagttatctaaaataaacacataaacgtgtaatgtttcagattgcaaggtgagatgtaatgtagcatttgtaagatattcttgtcaatattaactggtaggattttgatttgtacagttttaattggttaaaatgatctcattttaacatccactgctatagatgaatgatgtaagctcagatttaatgaatggtggggaaatggtgcatgtaattttttcgcaagtatcgagagttctgtatgttttgaaaagaataatttaacgtttgggttgccaggaagggggctttcccagagtccattgccaggcgttgggcaagcctcgcaatgttggcacggagcgttaaccacaccttactaatagcaaggggaataactttgaaataaagttttagacaaata

SEQ ID NO: 38 - DNA, 1289 bp, Rattus norvegicus (Norway rat)
cgcggccgcttctcactggcccagagcaagtgaagaccagtggagaatgaacccgttttcctctgagtcagcatggctctgcttgactgccactgcggtgctggggggcatgcttctctgcaaagcctggagttcagggcagctaaggagccaggtggtgtgtctggctggcctctggggaggtgcctgcctgctcagcctgtccctcctctgcagcttgttcctcttatcggtgtcctgcttcttccttctgtatgtgagttcatctgaccaagacttgttacctgtggatcaaaaggctgtgctggtgacaggtgccgattccggtttcggtcatgctttggccaagcacctggacaagctgggtttcacagtgtttgctggagtgctggataaagagggcccaggagcggaggaattgaggaaaaactgctctgagcgcctttcggtgctccagatggatgtcaccaagccagagcagataaaagatgttcacagcgaagtcgcagagaagatacaagacaaaggactgtgggctgtggtcaacaatgctggggtcttgcactttccgatcgacggggaactcattcccatgaccgtgtacagaaaatgcatggcagtgaacttcttcggagccgtcgaggtcaccaaggtgtttctgcctctacttagaaagtccaaggggaggctggttaacgtcagcagcatgggagccatgattccatttcagatggtggccgcctacgcctccacgaaggcagctataagcatgttctcagccgtcatcaggcaagagcttgccaaatggggagtcaaagtcgtgaccatccatcctggaggcttccaaacaaacatcgtaggctcacaggacagttgggataaaatggagaaggagatcctggaccacttttccaaagagattcaggagaactatggacaggaatatgtccatacgcagaagctcgccctcccggtcatgagagagatgtccaacccggatatcacccctgtgctgcgggacatccagcacgccatttgtgccaagaacccctcttccttttattgctcagggagaatgacttacctgtggatctgcttcgcggcctactccccgatcagcttattggactatattttgaaaaactattttactccaaaactcatgccaagagctttaaggacagcaagttagaagaacaagggcccgggtagggtgggaaatgccacatgcttaggatgaaagggaaacctcttattaaactaactttctacctcaaaaaaaaaaaaaa

SEQ ID NO: 39 - DNA, 447 bp, Rattus sp.
  misc_feature (404)..(404): n
tctcagctactgtatgcgaagtctgattatattggtgcgtttttacagttagggttttgcaataacttctatattttaatagaaacgaattcctaaaatccctcctctccccaatttcaggaatttaaaattaagtagaacaaaacaaaaacccagcgcacctattacagctgtcatccaccgtcatgggaatcagttttcattaaacttgaagcagttgtggcatcatcggcagtgttttggttcagacacctattcacagaaaagcatgatgggaaaatatttcctgacttgagtgttcctttttaaatgtgaatttttatttcgttttaattattttaaaatatttaagccttcttcttgatcttaaagatcgtgtagcttggggttggggacggatgaanggcgagtgagtctaaggataatgaaataatcagtgactgaaac

SEQ ID NO: 40 - DNA, 1902 bp, Rattus norvegicus (Norway rat)
tagcccgacgaactgagaactggccatggcacggaaacaaccacatagctggctgaatgctgtgctctttgggctcctgcttattcttatccatgtgtggggtcaggactcaccagagtccagctccatcaggaccacacacacgggccaggtccgaggaaagcttgaccacgtgagggacactaaagctggtgtccacaccttcctgggaattccctttgccaaggctcctgtaggaccgctgcgctttgcacctcctgaggaccctgagccatggagtggtgtgagagatgggacctcacatccggccatgtgtctgcaaaatattgatatgctggatgaagtaggcctgacagatatgaaaatgatactgtcttccattcctatgtctgaggactgcctgtatctcaacatctatacaccagcccatgcccatgagggctctaacctgcctgtgatggtgtgcatccacggaggtgcactggttataggaatggcttccatgtgtgatggatctctattggcagtcaatgaggacttggtggttgtcgctatccagtatcgtctgggtgtcctgggctttttcagcactggagatgagcatgccagaggcaactggggatacctggaccaagtggctgccctgcgatgggtccagcagaatatcgcccattttggaggcaaccctaaccgggtcactatttttggcgtgtctgcaggtggcacaagtgtgtcttcacatgttatatcccccatgtctcaagggctcttccatggtgccatcatggagagtggagtggccctgctgcctgaccttatctctgaaacctctgagacggtctccactacagtggccaagctctctggatgtgaggccacggactcagagaccctggtgcgctgcctgagagccaagagtggagcagagattctggtcattaacaaggtcttcaagatgattcccgctgtggtggatggagagttcctacccaggcatcccaaagagctgttggcatctgaggattttcgccctgtccccagcatcattggtgttaacactgatgagtactgttgcaccattcctatggtcatgggcactgctcaaataataaaggagctatccagagagaacctgcaggctgttctaaaggatacagcagcacaaatgatgcttcctcctgagtgtggtgacctgctaatggaagagtacatggggaatactgatgatccccagaccctacaaatacagtacgctgagatgatgggagacttcctgtttgtgatccctgcactccaagttgcacactttcaacgttcccatgcccctgtctacttctatgagttccaacatgcacccagctatttcaagaatgtcaggccaccccacgtgaaggctgaccatgctgatgaggttccttttgtctttgggtccttcttctggggcataaaagttgacttcactgaggaggagaagctgctgagtaggcggatgatgaagtactgggccaattttgcaagacacgggaaccccaacagcgagggtctaccctactggcctgtgttggaccacgacgagcagtacctgcagttggacacccagcctgctgtggaccgagccctgaaggccagaaggctgcagttctggaccaagactctgccccagaagatccaggagctaaatggagctcagaaaaaccatgcagagctgtagtgtctggtgaaaggaacagagtgtgggagtgagggcaggtgggatcattctgagtttcaaagtctaattttctgttccaacacgcagaatcctttccaaccccaatattttccctttctgacatgaatgagaagccctccgtgtgttactctttattcttctgggcaaaatttaattggactcaataaaga

SEQ ID NO: 41 - DNA, 2833 bp, Rattus norvegicus (Norway rat)
ctcgaggcccacagagaagaacgtcttcattgtctttatgatggctgtggctggactgtctctgtttctcagcctggctgaactctaccacctgggctggaagaagatccgacagcgcctggccaagtcacggcagggtgacaagcaccagcttcttggcccctccaccagcctggtccagggcctcactcctcctcctgacttcaaccagtgcctaaagaacagcccagatgagaaattcttcagtgacttcagtaataacatgggctcccggaagaatccagaccctctggccactgaggaagtgccaaaccaggagcagatcccggaggaaggtttcatccacacacagtatggccagaagcccgagcagcccagtggcgcctctgcaggccaccgctttcctcagggctaccacagtgacaagcgccgccttagtaaggccagcagcaaagcaaggtcagatgacctgtcagtgtgaccctcctcttagggaggaccagtcccagaaggaagccaaggagggtgaggcaggacagaagcggtctctctgactgtataccttcctcagcaccttctctcccgggtctggatggtgttgctcattaatcctccaaatttcagttctgagccgtattctcaaagattgggctactcctcaaatccccaaccccacatcctctaccagtattcgcagtgaagactttcaagtgatttagtgatatggtgggagcaggaatgggaaccttggcaaaatctggtctgggtaggacagacatgaagattcgacattagcaacagataaaccctcaccccaaatcttgtcttcttcggtactaggcccatcctttttattttttaaaggaagaatccaaggttgagagtattcatcaaataatctgcattgtattgttcctttgaatctgtcgtttccatgtgccatacctcagagtgctggtgaggtaactgtgggttgcccttggctgcatctccctcctcccagtcttaaaggggtgtccttggtcctcggccagcatcagctttacaagtgccttggtatgtgcctttggaaaacactgcatgttgatgatgctgcagccttactgccaggctagacacccagctcagaagggtgccaagacctctagaagtcactgtgcacataagcattgctggaattgccaccagctgtcatcctgcagtcctttacagttcaacctagtgatagaaaccgtcctggacagctcacccagtgttcctctaaaatcttggttaacaggaatgtccaaagtcaccatcctctcttggaccctggccagattaccagccaccaagttcagtggaatttccccaggatttaatgaaacaaagagagcattgtgcttctcaggttccttggggggtgttgggggggattcttctgtggagatgaaaagagaggagggggaggacactggaaaactattttcccttctgcatatgccttccactgcctcccagcttggactgctgagaggtgtggtgatagatagcaacggaggcccaagatctctctcttagaggcatcaaggggacctggaagccgagatggagctccggttggttttgacacggcccttatttagtgcagatgctcctgtgtttccttgggacccttaggtacatcagggagggactgtagaaaattcctgccttcctcagggtctatcctgggctatctactgagaggatccacagtcggtgtctctccttatgcagatggaaagatgctcagcgtcagatatcaagacttacaaacacaatgctctgtgtgtgtgtgtgtgtgtgcatgtgtgtgtatgagtgtgtgcatactcaaccatctatgtgtgtatatgtgtgtgtgtgcatgctcaaccatctgtgtgtgtgtgtgtgtgtgtgtgtgtgtgtgtgtgtgtgtgtatacccgtgtatgcatgcagatagaatggtaaagaagagccctgaagaactgtaaggaaacatgtagaaaacttgggtttttctgcctccttttctgttgcccgacaggacagctgagcttgcttcctaatcagcctaaaggtcaaacctgggaagtcagtacaggagggtgaaggttcagaggtcaacccctgcccatgtgaccatctctgggtccctctgctggtatttggatggctgaagatacttgggaaaggctgactggctgtcccagccccagtgtatctcattcattcctgacaccgacgctatgattctctgcttttctagttatgggatgtgtgtttgtcttctgaaatggggccttttgagttagaaaatctgagaccagtcttcgatggtgaggtttttcagaagagaaagagaaagtaatatgtgtgactggttttaaataaaatacgtctctacatgttaactctggtttgtgtctcctttggactgtggctttaagagggtggcagacttgatggagaagggagagcatggagtcagacgcacaagggttaaaatcccaactgctggtctctacctggccatcagtgagctctttcacttctgaagtctgttagtcacctgtaagtcaatccagtgatgttcactccattaggctgtgaagtgagaggctgtgtaggaagagaaagacagatcctctcaggcacaagagtttacaattgaggagccattgtcattattttcaatacagagtggtccagaacccgaggtactgagggataattctagaccttcctcttttggaactcacagcattatctacctggggggaacaaatgaactcacagaaaggacacaagtagggtgcaggacaggg

SEQ ID NO: 42 - DNA, 1147 bp, Rattus norvegicus (Norway rat)
gcagaaagtagtcatgacagcctttgcggatcgcacggttgtaaccatagctgtaagtgacatgcatggggtggggtggggtcggggtcgggtgtggggtcactcattcttctgtagtgagcttcaagtctgagaaggtaaaacatacttgtgttgattgtgtatttctttcttgtttcacattatatatattttcaatgacatcatctgaaatataaggacaccagctgatcacatgctaagtgtctgggctaatgtttggaaggaacatttcagaaagaacgctcctaagttccattaccaatttagctaatattcatgtacattttccctatttctatcatttaaagtagaagacagtgggagacctgacagccggggaaggtgatatccgtacatccaatagcaatcaggtccttgagtcaattagccccttgtcgaatttcttgcttgtaagggcattagttttctgtcccttcctcttgatctttgttatcattgccacccaccgaagactctatttcgtgatacacttgtccattcttcctgctcattctcttctctctccacctctctctcctccagcaccgtgtctcctctattatggatgcgggccttgttttagtcttttctgagggtattttagtggagtgcgatactggtccaaacctgctccagcacaagaatggcctcttttctactttggtgatgaccaacaagtagaccagcaagatctgctcctccaagtgtctcgttctctggtagttgtcatagcagaatctgctgagtaaggcagagaggaggcttcgattagagggagggctgggggaggaactaaccccgggtctaactgcacaagtcagctcacccaagtgcttgcattgtgtggcctcttatgttttcaaagacagcatgtaggaagcaaaaccaggctcacctgtggcctaaggacaagttaatctgaggctgttttctagtcacccttaaaatttctgtgtgttacctgcccaaagatggatttcagggattactgagtgtaactgcggagagccctgtgctttgagggacacttgctactcttggaagaaagaccactctttgaagtgcatctttctcaagctccagagagcgatttcccatgggcccc

SEQ ID NO: 43 - DNA, 1389 bp, Rattus norvegicus (Norway rat)
tgctcctctgctccaggctcctgccaagtttagcgcaggaagaaggcgcccaggaattgaactgcaatgatgagactgtatttcaggctgtggatactgctctgaagaaatataacgctgagttagaaagcggcaaccagtttgtgttgtaccgagtgactgagggcactaagaaggatggcgctgaaacattgtattccttcaagtatcaaatcaaggagggcaactgctctgttcagagtggcctcacctggcaggactgtgacttcaaggacgctgaggaagccgctactggcgaatgcacaacaactttggggaagaaagaaaataaattctccgtagccacccagatctgcaatattactccaggtaagggtcctaagaagacagaggaggacctctgtgtcgggtgtttccaacccataccgatggatagctcagacctgaagcctgttctgaaacacgctgtggagcatttcaacaacaacacgaagcacacccacctctttgctctcagagaagtaaagagtgcccactcacaggtggtggctggcatgaattataaaattatctactccattgtgcaaacaaattgttcaaaggaggattttccttccctccatgaagactgtgtaccccttccctatggcgatcatggtgagtgtacgggtcatacccacgtggatattcataacacaattgccggcttctcacagagctgtgacctttatccaggagatgatttgtttgaactacttcccaagaattgccgtggctgccccagggagatacctgtagacagcccggagctgaaggaggcacttggtcattccattgcgagacttaatgcacagcataaccatattttctatttcaagattgacaccgtgaaaaaggcaacatcacaggtggttgctggagtaatatatgtgattgagttcatagccagagaaactaactgttccaagcaaagtaaaacagaactgacagcggattgtgagaccaaacacctcggtcaaagcctcaactgcaatgctaacgtgtacatgagaccttgggagaacaaagtcgtcccgactgtcagatgccaagcactagatatgatgatttctaggcctccaggattttcacctttccggctggtgcgagtacaagaaactaaagaaggaacgactaggctcctaaactcatgtgagtacaagggcagactctcaaaggcaggggcaggcccagcacctgagcgtcaggcagaagcttcaaccgtgacaccatagcccggcaaagacccggagtggaaggaccagaagactcctgggatgtgtgcagcatggaagcatgtttcttcatcacctgatcctgggtgaaataaagttcagactcgacgagttc

SEQ ID NO: 44 - DNA, 2218 bp, Rattus norvegicus (Norway rat)
tctcccgggtattggctgcagctaagcggggcttcctgggccgactgaggtgggtagccagaaaaaggcctgaggtggctgacaaccagggcggccagacaacgcgagtcctgcgcgccttctgaggcctccctgggacttaactgtaacggggaggggcctctggagcagcggccagcgagttaaagtatgctgggagccgtgaagatggaagggcacgagccatccgactggagcagctactacgcggagcctgagggctactcttccgtgagcaacatgaacgccagcctggggatgaatggcatgaacacttacatgagcatgtccgcggctgcaatgggcagtggttccggcaacatgagcgcaggctccatgaacatgtcatcctatgtgggcgctggaatgagcccgtcgctggctggcatgtccccgggcgcgggcgccatggcgggcatgagcggctcagctggggcggccggcgtggcgggcatgggaccgcacctgagtccgagtctgagcccactcgggggacaggcggccggggctatgggtggccttgctccctacgccaatatgaactccatgagtcctatgtacgggcaggcgggcctgagccgcgctcgggaccccaagacgtaccggcgcagctacactcacgccaagcctccctactcgtacatctcgctcatcaccatggccatccagcagagccccaacaagatgctgacgctgagcgagatctatcagtggatcatggacctcttccctttctaccggcagaaccagcagcgctggcagaactccatccgtcattctctctccttcaacgactttctcaaggtgccccgcgcgccagacaagcctggcaagggctccttctggaccctgcaccctgactctggcaacatgttcgagaacggttgctacctgcgccgccagaagcgcttcaagtgtgagaacgaactggcgttgaaggaagcagcgggtgcgggcagtggcggaggcaagaagaccgctcctgggacacaggcttctcaggttcagctcggggaggccgcaggctcggcctctgagactccggcgggcaccgagtccccccattccagcgcttctccgtgtcaggagcacaagcgaggtggcctgagcgagctgaagggaacacctgcctctgcgctgagtcctccggagccggcgccctcgcctgggcagcagcagcaggctgcagcccacctgctgggcccacctcaccatcctggcctgccaccagaggcccacctgaagcccgagcaccattacgccttcaaccaccccttctctatcaacaacctcatgtcctccgagcagcaacatcatcacagccaccaccaccatcagccccacaaaatggacctcaagacctacgaacaggtcatgcactaccctgggggctacggttcccccatgccaggcagcttggccatgggcccagtcacgaacaaagccggcctggatgcctcgcccctggctgcagacacttcctactaccagggagtgtactccaggcctattatgaactcgtcctaagaagatggctttcaggccctgctagctctggccactggggagaaggacaagggaaatgacaggctgagtggaaacattgggggaactttgaggaaaaagtagccaccacacttaaggccccaaaggagcagtttcacctgtctgtgtccctaaatagctgggccacactgatctgtcattctaaatagggaagggaatggaaatatatatgtatacacataaacttgttttaatggaggacctttggttcccactatgtagactactgcttctcaaggcacctgcagattttgatttttgttcttgattctctctctattgctgtcgttgacagagaagtctgacttaaaaaaaaaacaaactaaacaaaaaaaaaaacttttgatgagtgacttgagtgtaaaaccatgtagttttaacagaaaaccagagggttgtattgatgtttaaaagagaaaaaaaaataatgatgtaagagtctggtataaatgaccaggagaaaggacaaaaatgcatccattctggacatggtgaaatccaggtctcgggtctgatttaatttatggtttctgcgtgctttatttatggcttataaatgtgtgttctggctagaatgccagagttccacaaatctatattaaagtattattgc

SEQ ID NO: 45 - DNA, 2622 bp, Rattus norvegicus (Norway rat)
cacctctgcgtattcacggaatggggaaatgccaagagccttccagtacgatttggtgtccagttctaccctgtacaccccttccgtgaacttctcatctgtggtgagcccgtgcagctctccagactcggcggtcttcccagaggcaaacggctcccagcttccgtctgcagtctttttgaacactttcacggtcacagtcctcactcacccacggagcatccaggatgaagtctgcgactgggcctctgcttcctacattgctggggctactgctcctgtctataccaaggactcagggtgtcaaccccgccatggtggtcaggatcaccgacaagggcctggagtacgcggccaaggaggggctgttgagtctgcagagagagctgtacaagatcacactgcctgacttcagcggggacttcaagatcaaggctgtgggccgtggacagtacgagtttcatagcctggagatccagagctgtcagctgcgtggctcgtccctgaagccgctcccaggccgaggcctgagtctctccatctctgactcttcgatcagcgtccggggcaaatggaaagtgcgcagatccttcgtgaaacttcacggctcctttgacctggatgtcaaaagtgtcactatttcagtggacctcctcctgggcgtggatccctcagaacggcccacagtcaccgcctctggatgcagcaaccgcattcgtgatttggaattgcacgtatcaggaaatgtggggtggctgctgaatcttttccacaaccagatcgagtccaagctccagaaagtattggaaagtaagatttgtgagatgatccagaagtctgtgacctctgatctgcagccttatctccaaactctgccagtcacagcggatatcgacactatcctgggcattgactacagtttggtggcggctccccaagcaaaggcccagacgctggatgtgatgtttaagggtgaaatttttaatcggaatcaccgctccccagtcactacccccaccccgaccatgagcctacctgaggacagtaaacaaatggtctactttgccatctcagatcaggccttcaacatagccacccgggtttaccaccaggccgggtacctgaactttaccatcacagatgacatgttaccgcctgactccaacatccggctgaacaccaaggccttccgccccttcactcctctgataaccagaaagtaccccgacatgaacttggagcttcttggaacagtggtctctgccccacttctgaatgtcagtcctgggaatctgtccttggccccacagatggagattgaaggctttgtgatcctgcccagctccgcccgcgaatctgtcttccggcttggcgtggtcacgaatgtattcgtctcattaacttttgacaacagcaaggtcaccgggatgctgcatccagagaaggcgcaagtgagactgatcgaatccaaagtcggcatgttcaatgtgaacctgttccaggcattcctcaactactaccttctcaacagcctctaccctgatgtcaacgatgagctggccaagggcttccccctccctctaccaaggcgtattaagctccacgacctcgacttccagatccacaagaacttcctatacttgggtgccaatgtccagtacatgagagtctgaggacaagaagaaagatgggcctcagaggccacagcgggacctgccatttgtaattccagatgcgtagcacatctccagagagtctcaaaatacaaagaagtttctgttcctggctctggtggatcctgtccccacagtcctcttcgccaggtgcaccctcagcctggacttgactctgacctctccagggagaagccctcccctcaccaacctctccagggagagcccctccccccaccaacctctccagggagacccctctcccaccactgacctggaatcacttaaagagcaggcactgtggttttgagtgcaccttctcaccttcatgtctgacggagtgctggcacttagtaggtcctcaataaatatttatagaatgacatgacagcccagctgaacctctttattgctagaccatctggtctgagccagccttagatgctctgtcagagctgttatctccaaggctagaccaccttttcactcttgttggcctctgctatgagggcctcaacaagggagtgaatgactacacacacacacacacacacacgcgcacacacacacacacgcacgcacgcacgcacgcacacgcatgcacatgcatacactcacgcacgtgcacgcacacaccactcccttcaccagcacgtgtctaggcttctagccttattcccacagatacctcctccttgcctcctgcttgctgcagacaacagacccagaaggaaagcaaaattgtagccccccgaggctgtccccatggaggtctgtgcaagtgagaaagagatggagccaaggaaggttttggttggacccaaatcaaacgctcatcggactgttgttcacgagccacatgcctgcgaggagagaccatgatttctaactaccgaacaataagcctttgatcagacttaataaagagtcatttccgtgttatgtaaaa

SEQ ID NO: 46 - DNA, 577 bp, Rattus norvegicus (Norway rat)
ggaattcggcacgaggcaggctgagctacagaccctgtcaacatgtttgtgacatacgtccttgcctctgctttgctctttgggtctgtcctgggccagagatgcagcacctcctggggcatccaacacacctcttaccttattgaaaacctgaaggacgacccatcatcaaaatgcagctgcagtgccaacgtgaccagctgcttgtgcctccccatcccatctgatgattgtaccacaccgtgcttccaggagggaatgtcacaggtgaccaatgccacccagcaatcaaaattctcaccttttttctttcgggtgaaaaggatagttgaaaccctaaagagcaacaagtgtcagtttttctcctgtgaaaagccgtgcaaccagaccacagcaggcaacaccgtgtcatttctgaagagtctcctgaagaccttccagaagacagaggtgcaagtgcagagaagcagggcgtgaagacagatactatttattctatttattgaatttacaaaaccttttctccctaattgttttaattgttacaatgaagaaataaactaagctattctagatt

SEQ ID NO: 47 - DNA, 2401 bp, Rattus norvegicus (Norway rat)
caacatgggggactctcacgaagacaccagtgccaccatgcctgaggccgtggctgaagaagtgtctctattcagcacgacggacatggttctgttttctctcatcgtgggggtcctgacctactggttcatctttagaaagaagaaagaagagataccggagttcagcaagatccaaacaacggccccacccgtcaaagagagcagcttcgtggaaaagatgaagaaaacgggaaggaacattatcgtattctatggctcccagacgggaaccgctgaggagtttgccaaccggctgtccaaggatgcccaccgctacgggatgcggggcatgtccgcagaccctgaagagtatgacttggccgacctgagcagcctgcctgagatcgacaagtccctggtagtcttctgcatggccacatacggagagggcgaccccacggacaatgcgcaggacttctatgactggctgcaggagactgacgtggacctcactggggtcaagtttgctgtatttggtcttgggaacaagacctatgagcacttcaatgccatgggcaagtatgtggaccagaggctggagcagcttggcgcccagcgcatctttgagttgggccttggtgatgatgacgggaacttggaagaggatttcatcacgtggagggagcagttctggccagctgtgtgcgagttctttggggtagaagccactggggaggagtcgagcattcgccagtatgagctcgtggtccacgaagacatggacgtagccaaggtgtacacgggtgagatgggccgtctgaagagctacgagaaccagaaaccccccttcgatgctaagaatccattcctggctgctgtcaccgccaaccggaagctgaaccaaggcactgagcggcatctaatgcacctggagttggacatctcagactccaagatcaggtatgaatctggagatcacgtggctgtgtacccagccaatgactcagccctggtcaaccagattggggagatcctgggagctgacctggatgtcatcatgtctctaaacaatctcgatgaggagtcaaacaagaagcatccgttcccctgccccaccacctaccgcacggccctcacctactacctggacatcactaacccgccacgcaccaatgtgctctacgaactggcacagtacgcctcagagccctcggagcaggagcacctgcacaagatggcgtcatcctcaggcgagggcaaggagctgtacctgagctgggtggtggaagcccggaggcacatcctagccatcctccaagactacccatcactgcggccacccatcgaccacctgtgtgagctgctgccacgcctgcaggcccgatactactccattgcctcatcctccaaggtccaccccaactccgtgcacatctgtgccgtggccgtggagtacgaagcgaagtctggccgagtgaacaagggggtggccactagctggcttcgggccaaggaaccagcaggcgagaatggcggccgcgccctggtacccatgttcgtgcgcaaatctcagttccgcttgcctttcaagtccaccacacctgtcatcatggtgggccccggcactgggattgcccctttcatgggcttcatccaggaacgagcttggcttcgagagcaaggcaaggaggtgggagagacgctgctatactatggctgccggcgctcggatgaggactatctgtaccgtgaagagctagcccgcttccacaaggacggtgccctcacgcagcttaatgtggccttttcccgggagcaggcccacaaggtctatgtccagcaccttctgaagagagacagggaacacctgtggaagctgatccacgagggcggtgcccacatctatgtgtgcggggatgctcgaaatatggccaaagatgtgcaaaacacattctatgacattgtggctgagttcgggcccatggagcacacccaggctgtggactatgttaagaagctgatgaccaagggccgctactcactagatgtgtggagctaggagctaccaccctcccacccctcgctccctgtaatcacctaacttctgccgacctccacctctggtggttcctgcctggcctggacacagggaggcccagggactgactcctcctggcctgagtggtgccctcctgggcccctaggcagagcccggtccattgtatcaggcagcccagccccagggcacatggcaagagggactggacccacctttgggtgatgggtgccttaggtcctctgcagctgtacagaaggggctcttctctccacagagctggggtgcagcccccacacgtgattttgaatgagtgtaaataattttaaataacctggcccttggaataaagttgttttcagt

SEQ ID NO: 48 - DNA, 2639 bp, Rattus norvegicus (Norway rat)
aaatatagtatttaatatttttttgaaagactcagcccattacaatacagaatggaatcaccatattcctagtctcttcttccttcaccaacagcctggtgctaacacaatgcattcatcttaatatttctgtatagacatcagtgataagaaggcctccaggattttcacctttccgggcacctcgagtgaaaaagcctaaagaaagtacaactgtaagtccatcctacattgccagggtgcaagaagagagggatccaggaaatgaacaaggacccatccatgggcatggctggttgcatgcaaagcaaataaagaataagaatcaccaaggtcataagcatgggcatggtattggccatggacaccagaaaccacatggccttggtcatggacatcaacttaaacttgatgatcttaaacagcaaagggaagacggctatgaccatagacatccagtgggacatggtcatggtcagaggcatggtcatggtcatggtcatggtcacggtcgtgataaacacacaaataaagacaaaaacaatgtcaagcacactgaccagagagcagagcctttgacaagctcttctgaagacaatactacatctacacagatacaggggaggacagagggcttcaccttgaaccctcccctagctcagccagctgttatctctcgtggttttcaggactcaggtttcactgaaggtgtgatagctaccacatcaccatatgacacggagacccatgatgatttgatccctgatatccatgtacaaccagatagcctttcatttaagctgatatctgactttccagaagcaacttcccacaagtgtcctgggcgcccatggaagccagttagtaggaaggatccaaccatagaaacaacagaattttctgattttgatctcctcgatgctctttcttaacttatacagcgtaggaatctttacaaatgctttcccagcctctttttctactgcccaaacacaaatattgtgacataagtcatcaagccatgaggctcagaacagcctgtcagtaggactttataaatccctgtggactgataataaaactgccatccttctgaattccttctgagcctgcctcacacgctctctgaaccaatacaggaagaagcctaccagaatccactgctcagataatgagtgggtatctcaagatacacatcgcatttccatacagaattatggtctctgtgtttagaaaacagaaaatcaagagactgaaggttgagtttatggatgggggaaaataacagcaaaacttccagatgtcagagaaagataagaaaacagaaacaggctgatcaaagggagaaagtgggcagtaatgacttgactttatgtttctcaagcaggttaagtatatcaaacgagactcccccttgagcaggttagccttggatttccttttgtgggtgatggtgttcctcactagtctacccctggctagtctttgtcatagctttcaagcaagagctttttggtagtgttgctgaggtcagatcaagcaatccttacttctcagaagttctgcatctaacaccaagggcagaaagtagaaggaagaatattgaagtaggtttgctgtggcaaccttttagttcttgtgataaggcatgtcgtgggagttgatggaaacttcattcctaccttttagaagccagtccttagcttcaccttaaattgctctatctttttgctatgacgctgaagactattgactttggagaaagagaaagaggttatcactcatggccttagaatgtgaggaaggtgtgtggtttacaacccatgctgtgcttttgctggaaaaagaagataggactttctgaaggcagagataagtcctccaggctccagcagacagttccatacccatgatctctgagagactctaggtaaattccctggccactaaacaaagacctgaaccccagaagtgaccctgtagggaggagggacccctgacaggtatggaaggagaacacagagtgggggatcagaacagtcagaatgtgtgtgattgtgggactcactgcagagtccccacaaactccgattacagaaagcaaggtgcctgcacaatgcactggagagatgtgtgggaataggaaataaggatgctgcttcacacggctacacagcctgtgtgtgtgtgtgtatggctgttgtgggaaactgcatttgagctgagtgttctttcattttaatcattgttttcctttaaaatggagacccaatgtcactgggaaacattctcaccctgtatctggctgcgctgctttgcctaagttgagcagaagcacgagattaacagcgttttactatattacagaggctcctaaactcatgtgagtacaagggcagactcttaaaggcaggggcaggcccagcgcctgagcgtcaggcagaagcttcaaccgtgacaccatagcccggcaaagacccggagtggaaggaccagaagactcctgggatgtgtgcagtatggaagcatgtttcttcatcacctgatcctgggtgaaataaagttcagactcgacgagttcacagtgtctccttcagccattcctatcttgtagtgaattgaagctgtctccaaagctt

SEQ ID NO: 49 - DNA, 250 bp, Rattus norvegicus (Norway rat)
cttaattttctcttctttccactaccacagattatggaaatgcctcaggacgcagtgaataagaagtgtttcgccagagccctgacctcaggacttcccaagaaaaacagtgtatttgtatttccagagatttgatcaataaaccatttttttcatatctacccatcaccattccctcattaattcagtcatcatttttttacattttcatgcttccacatctagtactcaataaaaactgatgaaaatc

SEQ ID NO: 50 - DNA, 300 bp, Rattus norvegicus (Norway rat)
gtcccaggatttatgaccctgtgtgtgggactaacggaattacttaccccagtgaatgcagtctgtgctttgaaaacaggaaattcggaacatctatccacattcagaggagatagagcgtctgcaaaaacagatcgaacggcataagaagaagattaatacctaaagaatagtgaggcattgagtgcacacagtcagtctctcacatagtggcagtatcattcccactcttatagagattgttttgaatgattgatgtttgaccatgtgtgctactaacagataataaattatcaccag

SEQ ID NO: 51 - DNA, 560 bp, Rattus sp.
aaatgaaacaaggtttatgccacacagtccaacaatgtataaagagcttgaagtagaaaagcttgtggaaaatgtatactctttacatggtacatacagttttatagctcataaataaacacagagaacaggagccattgttcacattaccgaccagcaacacagagcagcagtaacaacacaaacacaatttccttcgactcagccacaaaaacttgaaatggtctcaccatacttgaggaaaatgacaggtggtgaagtgttacagccacacccacatcaccaagtgctttaagttgtctctgggttagaaatatcaacaaccgtattaactccagagagaagaaggcagggtaagaccctgtcctataaggcacttaataaattgacactacccttgtcttaaaatactgcaaatttgccttgaaatatgctgatgttttacggcgaaatttaggtttcttttatccaggtttagacatagacataatttgaataaattgataatactgtctgatggccactctttacaccagcttcaaaatggacccatttaaact

SEQ ID NO: 52 - DNA, 479 bp, Rattus sp.
gaatctagggcatctcagggatccccgggaacaatcttgcctcaggcccctcccccgcaactccctgcatctgcatcccccttgcctgaaagcccttctaagctcggaaactgtgagctaaggagacatagcacaaaatcataaatgagttgcggggagaggctggaaacagtgtgcaagaaatacaggccaggggttggggatttagctcagcggtagagcgcttgcctagcaaacacaaggccctgggttcggtccccagctccaaaaaaaagaaaaaaaagaaaaaagaaaaaaagaaaaacaggccaatgctacatgtgaggctttgtggctgggctgtgacccagcgatatgggcagtggaggggatcttttgtctttggggactctctggagcccaacgatccaggctgtggtgcaggggatagtaaagttaaaatgctacccaccttttggccggttcctttcccctcaacc

SEQ ID NO: 53 - DNA, 494 bp, Rattus norvegicus (Norway rat)
cggccgctccaacatcagccgaggtagcctggggttggtaccagaggcccactgacacgctgggtttctgaggtctggtccagtggacagaatcttcttcttttacagcctcctcatcgagtgatttcaggatctccttcttcgtgtcctggttaccagcaagggcaaatgcataggccaacagcgccttagtgtagacatggctgccaccagctcctccccttgctgacttccaggctgtgtccaggcaaaagagggcattgcggacaacaggatgagtgacaggaagagacatctccaggagagctatggtgatgtaggcagacaaggtgacttcatcttctactcctcccttcatggcattgttgagcagtgacccggagctcctgaaacaaccattgtccttctgctgctgagagagccataagaaggcttgggtgatgtgtacttcatcgatgaagatatattttcgagcctgagcaaaactcttcagt

SEQ ID NO: 54 - DNA, 454 bp, Rattus norvegicus (Norway rat)
tttttttttttttttttctgtgaacacatttatctttattgagttctcaccctgggtcacacaggaaggcgtttgctcatctgtgctctcatccacccccagccctgttaagtggcactcagtgtgtttatttaacagaaaaggaaactgaggttcagagtagagggtttcagcgaagaccagtcagccaggagggacagttggatcccaagctctgggagtcctcccttttgtctgcctccaactccgactcagctcttttcctcaccagctacattcatgagagattctggaaccttccagttcatgcccaccccgccagtccagtctagggacccttcacagaatggttttcttcacgtgggctcgagggcgatcaggtaacagaggtgggtgagtgtccgagcccagaaagatgaggtcgcttgagaggaagtccttctctttgctggaa

SEQ ID NO: 55 - DNA, 441 bp, Rattus sp.
atgcttaaaaatatatatgtattggggcatggttaatcctggctaattaaaatatgcattacctcaaaacatgatcaaagctttctcataatactgtaccggaatagtttaaatgcatcattaacattccgattgcattatccagtagttaatcaacagaatattaaatctttgcccaaaaaacttttggaacaggaactcaaaagcccaaaactcagctactcttggggctcccatctccagttctcttaatcctggctaaaacagcggccttaaaaacttttttccggtcgtaagccaggcccagggcagccatgcagtcgatgaaaaacgtggtgaaattgatgtgccagcggtactcactggcaaagtagtcctaggggaaggcctgatggtagttgtggaaacccttgcccacggtacccagggaaaccaggatgt

SEQ ID NO: 56 - DNA, 540 bp, Rattus sp.
ttgagttctctgataaatacatagagttttaatgatcagtattcgatagtggatgaagacatgcattagttagactagaaatgccacacatttgttcatatatttgttcactataaaattttctgtttcgaaatttaacgttttggttcccattttagaatacacaataatcaggaggatacatgatggggagccagttttcagtaaaagacgcacaatgggtccatccgagtaatttcatcagttgaatacaatttttccagttttcttttgttggtttttcttctacgagtttggttgcaaacttaaggcctctcccgtacatcttatttactaatgcatgcttgtatgcaaatgtcaaaaccttagtgtcaaaaagatctgtccactttgtagtttcccaataggtttctgatagagattccaaggtactttctccttcctcttcttttgcttctgcatcttcagctgctgccccatcgtggggctgtgcatgaagaaagtggtctgccagagcacattctttcctgcagagggcat

SEQ ID NO: 57 - DNA, 499 bp, Rattus sp.
  misc_feature (461)..(461): n
tttttccttttttttttttttttttatttttactttctctttttcttttgcacaacaagaagtctacaggatcttttaagactgttgttttgttctgctttgttatcaaccatttcaccaggagaacaagttgaatggacctttttaaaaagaaaacggaaggaaaactaagagtgatcatctcccccaggtgttctccggcctggactgtgataaccgttatttatgagagactttcaatgccctttctacagtcggaaggttttctttatatacttattcccaccatggggagcgaaaatgttaaaaaaaaaaaaaatcacaaggaattgcccaatctaagcagactttgccttttttcaaaggtggagcgtgaataccagaaggacccagtattcggttacttaaatgaagtctttggtcagaaatggcctttttgacacgagcctactgaatgctgngtatatatttatatataaatatatatatatatatattg

SEQ ID NO: 58 - DNA, 413 bp, Rattus norvegicus (Norway rat)
ttattaaaaaaaaaagttttattttggtttacgtttccagagggatgaatccatcaaggcagggaggcgggacagcagggggcaggcacagaagcaacaggaagttgaaaattcacatcttcaaacacaagaaggaagcagaaagggggggtgaggagaaagcagtgtttgatatttcctacacacacatgtcaacattcaccgttcttagaccactgagtcaggctctgacatccttctgagcctcacaagggaatggttttgccattcccatgaggccatgcactgaggtactaaacatggctgtggccatgtcaacaacatagccccactctggacctcactctagacactgtaaagaggacaggaggaccccatgcatgtaactatggggaaagctatcattcgcgctg

SEQ ID NO: 59 - DNA, 355 bp, Rattus sp.
  misc_feature (61)..(61): n
  misc_feature (75)..(75): n
  misc_feature (221)..(221): n
  misc_feature (243)..(243): n
gacgtaaaatagaaacagactttatttctctggaagaagcagatatccatggctgggacanagctttggcaacanaggcgatgggaacacatcaaatggacacaggggaggaacaggcatcaaacaggacaagtactggtgccgctggggtctccctccacacccggggcctggggccctggtccctgccagagaagatcctggcgcctcttctgtttctnagccacttcaggctgtttacanttacaagatctaagaccagccaagcccgagttcacagtgaagccacaggtcacattctgtccaacactccacattcctacaggggttccctgggaaaagggggcctggtcct

SEQ ID NO: 60 - DNA, 1912 bp, Rattus sp.
cagattaggatcagcgagcacttgaggacttagggccacaaaaaaccgcacaagatcgacagactatttctggagagctgcagaacgggcacgctggggtcgctggtgctggccatggtgatggaggtgggcatcctggacgccggggggctgcgcgcgctgctgcgagagcgcgccgctcagtgcctgcttctggattgtcgctccttcttcgccttcaacgccggccacatcgtgggctcagtgaacgtgcgcttcagcaccatcgtgcggcgccgcgccaagggcgccatgggcctggagcatatcgtgccgaacaccgaactgcgcggccgcctgctggccggagcctatcacgccgtagtgctgttggacgaacgcagcgccgccctggacggcgccaagcgcgacggaaccctggccctggccgcgggcgcgctctgccgagaacgccgctccactcaagtcttctccctccaaggaggatatgaagcgttttcggcttcctgccctgagctgtgcagcaaacagtccacccccatggggctcagcctcccgctgagtactagtgtgcctgacagtgcagaatccggatgcagctcctgtagtacccctctctacgaccaggggggcccagtggagatcctgtccttcctgtacctgggcagtgcttaccatgcttcccggaaagatatgctcgacgccttgggtatcactgctttgatcaacgtctcggccaattgtcctaaccactttgagggtcactaccagtacaagagcatccctgtggaggacaaccacaaggcagacattagctcctggttcaacgaggcgattgactttatagactccatcaaggatgctggaggaagggtgtttgtgcactgccaggccggcatctccaggtcagccaccatctgccttgcttacctcatgaggactaaccgagtgaagctggacgaggcctttgagttcgtgaagcagaggcggagtattatctcccccaacttcagcttcatgggccagctgctgcaatttgagtcccaagtactggcccctcactgttctgcagaagctgggagcccggccatggctgtccttgaccggggcacctctactacaacggtcttcaacttccctatctccatccctgttcaccccacgaacagtgccctgaactaccttcaaagccccatcacaacctctccgagctgctgaagggccaggggaggtgtggagtttcacgtgccaccgggacgacactcctcccatgggaggagcaatgcaataactctgggagaggctcatgtgagctggtccttatttatttaacaccccccccccaaacacctcccgagttccactgagttcccaagcagtcataacaatgacttgaccgcaagacatttgctgaactcagcccgttcgggaccaatatattgtgggtacatcgagcccctctgacaaaacagggcagaagggaaaggactctgtttgagccagtttcttcccttgcctgttttttctagaaacttcgtgcttgacatacctaccagtattaaccattcccgatgacatacacgtttgagagttttaccttatttatttgtgtgggtgggtggtctgccctcacaaatgtgattgtctactcatagaacaacgaaatacctcactttgtgtgtttgcgtactgtactatcttgtaaatagacccagagcaggctttcagcactgatggacgaagccagtgttggtttgtttgtagcttttagctatcaacagttgtatgtttgtttatttatgatctgaagtaatatatttcttcttctgagaagacattttgttactaggatgactttttttttatacagcagaataaattatgacatttctattgaaaaaaaaaaaaaaaa

SEQ ID NO: 61 - DNA, 1908 bp, Rattus norvegicus (Norway rat)
gcgcggtgaagccagattaggatcagcgagcacttgaggatttagggccacaaaaaaccgcacaagatcgacagactatttctggagagctgcagaacgggcacgctggggtcgctggtgctggccatggtgatggaggtgggcatcctggacgccggggggctgcgcgcgctgctgcgagagcgcgccgctcagtgcctgcttctggattgtcgctccttcttcgccttcaacgccggccacatcgtgggctcagtgaacgtgcgcttcagcaccatcgtgcggcgccgcgccaagggcgccatgggcctggagcatatcgtgccgaacaccgaactgcgcggccgcctgctggccggagcctatacgcccgtagtgctgctggacgaacgcagcgccgccctggacggccgcaagcgcgacggcaccctggccctggccgcgggcgcgctctgccgagaagcgcgctccactcaagtcttcttcctccaaggaggatatgaagcgttttcggcttcctgccctgagctgtgcagcaaacagtccacccccatggggctcagcctcccgctgagtactagtgtgcctgacagtgcagaatccggatgcagctcctgtagcacccctctctacgaccaggggggcccagtggagatcctgtccttcctgtacctgggcagtgcttaccatgcttcccggaaagatatgctcgacgccttgggtatcactgctttgatcaacgtctcggccaattgtcctaaccactttgagggtcactaccagtacaagagcatccctgtggaggacaaccacaaggcagacattagctcctggttcaacgaggcgattgactttatagactccatcaaggatgctggaggaagggtgtttgtgcactgccaggccggcatctccaggtcagccaccatctgccttgcttacctcatgaggactaaccgagtgaagctggacgaggcctttgagttcgtgaagcagaggcggagtattatctcccccaacttcagcttcatgggccagctgctgcaatttgagtcccaagtactggcccctcactgttctgcagaagctgggagcccggccatggctgtccttgaccggggcacctctactacaacggtcttcaacttccctgtctccatccctgttcaccccacgaacagtgccctgaactaccttcaaagccccatcacaacctctccgagctgctgaagggccaggggaggtgtggagtttcacgtgccaccgggacgacactcctcccatgggaggagcaatgcaataactctgggagaggctcatgtgagctggtccttatttatttaacacccccccccccaaacacctcccgagttccactgagttcccaagcagtcataacaatgacttgaccgcaagacatttgctgaactcagcccgttcgggaccaatatattgtgggtacatcgagcccctctgacaaaacagggcagaagggaaaggactctgtttgagccagtttcttcccttgcctgttttttctagaaacttcgtgcttgacatacctaccagtattaaccattcccgatgacatacacgtttgagagttttaccttatttatttttgtgtgggtgggtggtctgccctcacaaatgtcattgtctactcatagaagaacgaaatacctcactttttgtgtttgcgtactgtactatcttgtaaatagacccagagcaggctttcagcactgatggacgaagccagtgttggtttgtttgtagcttttagctatcaacagttgtagtttgtttatttatgatctgaagtaatatatttcttcttctgtgaagacattttgttactgggatgactttttttatacaacagaataaattatgacgtttctattg

SEQ ID NO: 62 - DNA, 2370 bp, Rattus sp.
gtggaattcttagagccaaatgtgaatgatagcaataatctatacattctagtagccagggaggacaagttttgccatgaaagatccaggttacaaaactctaatgcagttcaaactcagaatgatgacacattccaacattcaatcaggaagggctacaaagaccctatctaaaaaaacaagaaacaaaaaccaaatcaagtcaataaaccaaagtaccactataggaagatttgtaaatgttaaattattttaccaacgatctttatttttaaaataagcccaacttcaatcaaagtgaagtttttaatgttaattctttatacaaatcaatctttagagtgacagttctgagtttctctgtgtcaccttggctgtcctccaacagaggttgacctgcctctgcctgcccgagtgctacgattgaagaccgtgccaccaacgctcgaggccttaaagatgataacctacaaaattctgctttaaagaatattctattgtgacgtaagcctgtaaatcttaccacttgagaggtctctgatataattagatcacaagtttaaggtcagtttgtgtcacacagttcaaggctagactgaacttcttcacagcaagaccttatctcaaaaacaagcaaaaacataaacaaaaaaggaaaaaaagaaaaaagaaaaaaacccacccaactacaataagatcacaactcaagaattttaagtttaacaaacatacttaagacttctcccaaaaaaaaaaaagtatattcccagaaatatagaaactctctatttcaatgattttgtatatatccttagagaagaaacattttcttggcacagaggcagagctgaaacaatgtcttactatgtaagacattctctcgtgccgaattcggcacgagagaagaagggcaggatgctgggggtctactgcgagagtggtacatgatcatctctcgagagatgttcaaccctatgtatgccttgttccgtacctcacctggtgaccgggtcactacacgatcaatccatcttcccactgtaaccccaaccacctcagctacttcaagtttagctggacgatatgtagccaaagctgtaatgacaaccgccctcctggagtgctactttactaggtctttctacaaacacatcttgggcaaatctgtcaggtatacagatatggagagtgaggattaccacttctaccagggtctagtttatctgcttgaaaatgatgtctctacattaggttatgacctcaccttcagcactgaggttcaagaatttggagtatgtgaggttcgtgacctcaaacccaatggagccaacatcttagtaacagaggagaacaagaaggaatatgtacacctggtttgccagatgagaatgacaggagccatccgcaaacagctggcagccttcttagaaggcttctatgaaatcattccaaagcgcctcatatccatctttactgagcaggagttagagctgctctatacagggctgcctaccatcgacatagatgacctaaaatctaacactgagtaccacaagtaccagtccaactccattcagatccaatggttctggagagcattgcgttcctttgaccaagcagaccgtgccaagttcctccagtttgtcacaggtacttccaaggtgcccctgcaaggatttgctgcccttgaaggcatgaatggcattcagaagtttcagattcatcgagacgacagatccacagatcgcctgccttcagctcacacatgttttaatcaactggacctgcctgcctatgagagctttgagaagctccgccacatgctactattggccatccaggagtgctctgaaggctttgggctggctaataaataaggccctgcctacttctgtggggtttttctaccatttttggacctggggaggggggggggtttaaaagatccagaaagaaaatgtcaaaatccaataaatgaaattcaccaactcaccatgtgtgtgtccagctgcccatcttcctagtgcatacctgttcgcttctcattctctttcctctaccctttccttgcctttcccttttccatgccgtccatgatccccaccccatgtgttaagaaggcagttgctttgcagggacctgtttgtccaactgaacagtgtgctcctcagattctgtgttcagaaggatttgctgcattgagacttgaaacctttggtaaggggaaaattatatatatatatatttttttgttctgtttgcatttcttaatttgtgcttggaatgtgttgatgtgcacagctaatgattcaatgcgagacaagattggcatctgtgttgtggaggttcaaataaagagcactcttcata

SEQ ID NO: 63 - DNA, 1756 bp, Rattus norvegicus (Norway rat)
ctgggtcggggagacctttcctctctggccgtttcctaattctgaatcatgtctgataacggggagctagaggacaagcccccagcacctccagtgcggatgagcagcaccatttttagcactggaggaaaggatcctttatcagccaatcacagtttgaagcctttgccttctgttccagaggaaaaaaaaccgaggaacaaaatcatctccatattctcaagcacagaaaaaggaagtaaaaagaaagaaaaagaacggccagagatttctccgccgtctgattttgagcataccatccatgttggctttgatgctgttacgggagagttcactggcatgccagagcagtgggcacggctgttgcagacctccaacattaccaaactggagcagaagaagaacccgcaggctgtgctggatgtcttgaagttctacgactccaacactgtgaagcagaagtacctgagcttcactcctcctgagaaagatggctttccttctggaacaccagcactgaacaccaaggggtcagagacatcagctgtggtgacagaggaagacgatgacgatgaagatgctgctcctcccgtcattgcccctcggccagatcatacaaaatcaatctacacaaggtctgtcatcgaccctattcctgctccagttggtgactctaatgtcgacagtggtgccaagtcttcagacaaacagaaaaagaaagccaagatgaccgatgaagagattatggagaaattaagaactattgtgagcataggtgaccctaagaaaaaatacacaagatatgaaaaaatcgggcaaggggcttctggtacagtttttactgcaactgatgtggccctggggcaagaggttgctatcaagcagattaatttacagaaacaaccaaagaaggaattgatcattaatgaaattctggtgatgaaggagttaaagaatcccaacatagttaacttcttggacagttacctggtaggagacgagttgtttgtggtaatggagtaccttgctggtgggtccctcactgatgtcgtgacagaaacctgcatggatgaagcgcagatcgcagctgtgtgcagagagtgtttacaggcgttggagtttttacatgctaatcaagtgatccacagagacatcaaaagtgacaatgtgcttttgggaatggaaggctcagttaaactcactgattttggcttctgtgcccagatcacccctgaacagagcaaacgcagtactatggttggaacgccatactggatggcaccggaggtagtcacgcggaaagcctatggccccaaagttgacatatggtctctgggcatcatggctatcgaaatggtggaaggagagcctccatacctcaatgaaaatcctttacgggcattatacctgatagcaacgaatggaacacctgagctccagaatccagaaaaactttcccccatatttcgggatttcttaaatcggtgtttggaaatggatgtggagaagaggggttcagccaaagaactattacagcatcctttcctgaaactggccaaaccattatccagcttgacscctctgatcctggcagctaaagaagcaatgaagagtaaccgctaacgtcgtcagcgaggcctcatgttcctttatccattttctaaagaagtcttttaatacatgaaattgttactctgaggggtgtaaagagacagtttgcatcacatggagaaaagcaagcaaacttattattttc

SEQ ID NO: 64 - DNA, 2746 bp, Rattus norvegicus (Norway rat)
gctcctcacagctccccctccacctctgagtggatcctcctctgagtttctcttcttcctcagagctcctcctcctcccggtcctgcaaggctccagacttctcgacttggtttcagaaagcaccggtggctgtagtcgggattgagaggtgtttccaaagaaacccaaagagcagcagggcagccatgaggatgccgacggggtctgaactgtggcccatagccatattcacgatcatcttcctgcttctggtggacctgatgcacaggcgccagcgctggacttctcgctaccctccgggccctgtgccctggcctgtgctgggcaacctgctgcagatagacttccagaatatgccagcgggctttcaaaagctgagatgtcgctttggggacctgttcagcttacagctggcctttgagtcggtggttgtactgaatgggctgccagccctgcgagaggcactggtgaaatacagcgaggacaccgctgaccggccaccgctgcatttcaatgaccagtcgggctttggaccacgctctcaaggtgtggtcctcgcgaggtatggacctgcctggcgtcagcagcggcgcttctctgtgtccaccttccgtcactttggcctgggcaagaagtcactggagcagtgggtgacagaggaggccagatgcctctgtgctgccttcgctgaccatagtggattccctttcagccctaacactctactggacaaagcagtgtgtaacgtgatcgcgtccctcctctttgcctgccgctttgaatacaatgacccacgcttcatcaggctcctggacttgctgaaggacactcttgaggaggaatctggattcctgcccatgctcctgaatgtgttcccgatgctcctacacatcccagggcttcttggcaaggtattctctggaaagaaggccttcgttgccatgctggacgagctgctaactgaacacaaggtgacctgggaccctgcgcagccaccccgagatctgactgatgccttcctggctgaggtggagaaggccaaggggaatcctgagagcagcttcaatgatgagaacctgcgtgtggtggtggctgacctgttcatggcggggatggtgaccacctccaccacactgacctgggccctgctgttcatgatcctgcgtccagatgtgcagtgccgagtacaacaggaaatcgatgaggtcatagggcaggtgcggcgtccagagatggcagaccaggcacgaatgccgttcaccaatgctgtcatccatgaggtgcagcgctttgcagacattctccctcttggtgtgcctcacaagacttctcgtgacattgaagtgcagggcttccttatccctaaggggacgaccctcatcatcaacctgtcctcagtgctgaaggatgagactgtctgggagaagcccctccgcttccaccctgaacacttcctggatgcccagggcaactttgtgaagcatgaggccttcatgccattctcagcaggccgcagagcatgcctgggggagcccctggcccgcatggagctcttcctcttcttcacctgcctcctgcagcgcttcagcttctccgtgcccgctgggcagccccggcccagcaactatggcgtctttggtgctctgaccaccccgcgcccctaccagctctgtgcttcaccccgctaaggggaggcacagcatctcactcactgtgcttgctggggtcctagtgtgcaataaatggttttactctgaaccgaatcatccctgtgagctctccaggctgtaaggggcctgagcagccttcccgtggacatccgcacccctacttaatcttccttgaccatgtgccccaatggaagggctgctctactgacctccgaaatggcagccattcttgctttcacccctgccccctcttttcacccaaattgatgatgtttattcatagatgccaacatctggaaggagggccagaaaggactgctgtgaagggtcagtgtaagtcacacagatgagggaaggggcggtggaggtaatggtgggcagaattgtcccctttccacttgagatgtttctcccagacgcccccatttcagacccactacacaaccaaggctaactcctcagccagcatcatcacaacttcttatatgacgtcgcagagatgtagagaagtcggggaggctggaaatgacatgcaggttaagtgcccaaggttacctgttgggtaccacatgcttccctaaacggttttgtgggggtccagaagcaggttgcctcctaagcttctttgtcaccattaattccatgacccagcagggatactggtgtccaggcccatgcacagtaagaaagtgactctaaccagggatggaaggacccgcaagcttagtgttgacacagactcccagaccttagcacaactgactccatggtagaagtaccatttgggccataaaacttagcacgtagacagcagctcctctcataatgaaaacaaagacctaacccatcaaattctatcctgggaaggtctcttgaagcactcctcttggcttcttggcttctgtagttctcctagctaactgctcttgctaactgaagtatgtcaacccaggatatggttgttggtaaaagctcgccctgagaacagctcaggacgacattgaggtgacccagtgtagtcaccagccagctaataaagacctccttttggtttaaaaaaaaaaaaaaaaaaaaa

SEQ ID NO: 65 - DNA, 1395 bp, Rattus norvegicus (Norway rat)
atggaactaatttctgaaaagtccaaagagggagcacatccctgggacaaagctgaacagagtgactttgaagctgtggaagcgctcatgtccatgagctgcgactggaagtctcacttcaagaaataccttgaaaacaggcctgtcacaccagtgtctgatacctcagaggaagacagtttgcttccagggacgcctgaccttcagaccgtcccagcattctgtttgactccaccttacagcccctctgacttcgaaccctcgcaggggtcaaatctgacggcaccagcgccacctactggtcacttcagatcgctctccgatgctgccaagcctcccagcatcgctccttttaaagaggaggaaaagagcccattagctgcccctcccctccctaaggctcaagccaccagtgtcatccgtcacacagctgatgcccaactctgtaaccaccagtcctgccctgtgaaagcagctagcatcctcaactaccaggacaattctttccggagaagaacccacataaatgtcgaggctactcgaaagaacataccctgtgctgctgtgtcaccaaacagacccaagtctgagcccagcacagcggcgaatggcgctgagaaggccggcactgcgccgtatgactttgctgtgccttcctcagagacagtcatctgtaggtcttctcagccagctcccacgtccccagtacagaactcagtactgatgtcttcacctacagtgtccactgggggagtgccacccttgcctgtcatctgccagatggttccccttccagcaaacaactctctcgttaccacagttgtccccagcagtccgcccagccagccacccgctgtctgctcacccgtgttgttcatgcactcagtgcccaagggcacggtcatgtttgtggtaccccagcccgttgtacagagcccaaagcctccagtggtgagccccaatggcaccagactgtctcccattgcccctgcgcctggattctctccttcagcagcaagggttactccccagattgattcgtccagagtaagttgtcacatctgtagccacccaggatgtggcaagacttactttaaaagttcccatctgaaggcccacgtgagaacacacacaggggaaaaacctttcagctgcagctggaaaggctgtgaaaggaggtttgctcgttccgatgaactgtccagacaccggcggacacacacaggtgagaagaaatttgcctgtcccatgtgtgaccgtcggttcatgagaagtgaccatttaaccaaacatgcccggcgacacctatcagccaagaagctgccaaactggcaaatggaagtgagcaagttaaatgacatcgctctgcctccggccacagcgtcggcacagtga

SEQ ID NO: 66 - DNA, 2170 bp, Rattus rattus (black rat)
ccacgcaggatcacgatgctgcccagcctggcactgctcctgctggccgcctggacggttcgggctctggaggtgcccactgatggcaatgccggtctgctggcagaaccccagatcgccatgttctgtggtaaactcaacatgcacatgaatgtgcagaatggaaaatgggagtcagacccatcagggaccaaaacctgcattggcaccaaggagggaatcctgcagtactgccaagaggtctaccctgaactgcagatcacaaacgtggtggaagccaaccagccagtgaccatccagaactggtgcaagcggggccgcaagcagtgcaagacgcacacccacatcgtgattccttaccggtgcctagttggtgagtttgtaagcgatgcccttctcgtgcccgacaagtgcaagtttctacaccaggagcggatggacgtttgtgagacccatcttcactggcatactgttgccaaagagacatgcagtgagaagagcactaacttgcacgactatggcatgctgctgccctgtggcatcgacaagttccgaggggtcgagttcgtgtgctgcccgttggcggaggagagcgacagcatcgattctgcggacgcagaggaggacgactccgatgtctggtggggtggagcggacacagactatgctgatggcggtgaagacaaagtcgtagaagtagccgaagaggaggaagtggccgatgttgaggaagaagaagctgaggatgacgaggatgtggaggatggggatgaggtggaggaggaggccgaggagccctacgaagaggccacagagagaacaaccagcattgccaccactaccacaactaccactgagtctgtggaggaggtagtccgagttcccacgacggcagccagcacccctgacgcagtcgacaagtacctggagacccccggagatgagaacgagcacgcccatttccagaaagccaaagagaggttggaagccaagcaccgagagagaatgtcccaggtcatgagagaatgggaggaggcagaacgtcaagccaagaatttgcccaaagctgacaagaaggccgttatccagcatttccaggagaaagtggaatctctggaacaggaagcagccaacgagaggcagcagcttgtagagacacacatggccagagttgaagccatgctcaatgatcgccgtcgcctggccctcgagaattacatcaccgcactgcaggcggtgcctccaaggcctcatcatgtgttcaacatgctgaagaagtacgtccgtgcagagcagaaggacagacagcacaccctaaagcattttgaacatgtgcgcatggtggaccccaagaaagctgctcagatccggtcccaggttatgacacacctccgtgtgatctacgagcgcatgaaccagtctctgtccctgctctacaacgtccctgccgtggctgaggagattcaagatgaagttgacgagctgcttcagaaggagcagaactactccgacgacgtcttagccaacatgatcagtgaacccagaatcagttacggcaacgatgctctcatgccttctttgactgaaacgaagaccactgtggagctccttcccgtgaatggcgaattcagcctggatgatctccaaccgtggcatccttttggggtggactctgtgccagccaatacagaaaatgaagttgagcctgtcgacgcccgccccgctgctgaccgaggactgaccactcgaccagggtctgggttgacaaacatcaagacagaagagatctcagaagtgaagatggatgcggagttcggacatgattcaggcttcgaagtccgccatcaaaaactggtgttctttgcagaagatgtgggttcaaacaaaggtgccatcattggactcatggtgggtggcgttgtcatagcaacagtgattgtcatcaccttggtgatgctgaagaagaaacagtacacatccatccatcatggcgtggtggaggttgacgctgctgtgaccccggaggagcgccacctctccaagatgcagcagaatggatatgagaatccaacatacaagttctttgagcagatgcagaactaaaccccgccccccgccacagcagcggcctctgaacttgacagcaaaaccattgcttcactacccatcg

SEQ ID NO: 67 - DNA, 1796 bp, Rattus norvegicus (Norway rat)
gttcacagccactgcgccctcgctctcttcttgcagatcttgcagccgcagcaagccaggccacctcgtccttcgaagccatgtccaccaggtccgtgtcctcgtcctcctaccgcaggatgttcggtggctccggcacatcgagccggcccagctccaaccggagctatgtgaccacatccacccgcacctacagcctaggcagcgcgctgcgccccagcactagccgcagcctctattcctcgtccccgggtggcgcctatgtgacccggtcctccgccgtgcgcctgcggagcagcatgcccggcgtgcggctgctgcaggactccgtggacttctcgctggccgacgccatcaacaccgagttcaagaacacccgcaccaacgagaaggtggaattgcaggagctgaatgaccgcttcgccaactacatcgacaaggtgcgcttcctcgagcagcagaacaaaatcctgctggccgagctcgagcagcttaagggccagggcaagtcgcgcctgggcgacctctacgaggaggagatgagggagttgcgccggcaggtggatcagctcaccaatgacaaggcccgtgtcgaggtggagagggacaacctggccgaggacatcatgcggctgcgagaaaaattgcaggaggagatgctccagagggaggaagccgagagcaccctgcagtcattcagacaggatgttgacaatgcttctctggcacgtcttgaccttgaacgtaaagtggaatccttgcaggaagaaattgcctttttgaagaagctgcacgatgaagagatccaggagctgcaggcccagattcaggaacagcatgtccagatcgatgtggacgtttccaagcctgacctcaccgctgccctgcgtgatgtccgccagcagtatgaaagtgtggctgccaagaacctccaggaggccgaggaatggtacaagtccaagtttgctgacctctctgaggctgccaaccggaacaacgatgccctgcgccaggcaaagcaggagtcaaacgaataccggagacaggtgcagtcactcacctgcgaagtggatgcccttaaaggcactaatgagtccctggagcgccagatgcgtgaaatggaagagaattttgcccttgaagctgctaactaccaggacactattggccgcctgcaggatgagatccagaacatgaaggaagagatggctcgccaccttcgtgaataccaggacctgctcaatgtaaagatggctcttgacattgagatcgccacctacaggaagctgctggaaggggaggagagcaggatttctctgcctcttccaaacttttcttccctgaacctgagagaaactaacctggagtcacttcctctggttgacacccactccaaaagaacactcctgattaagacggttgaaaccagagacggacaggtgatcaatgagacttctcagcaccacgatgaccttgaataaaaactgcacaggctcagtgcaacggcgcagtaccagcaagaaggaaaaaaaaatcgtatcttagaaaaaagagctttcaagtgcctttactgcagttttcaggagcgcaagatagatctgggatagaaacgagctcagcacataacaactgacacccccaaaaggcgtagaaaaggtttacaaaataatctagttttacgaagaaatcttgtgctagaatactttttaaagtatttttgaataccattaaaactgctttctttttccagaaaatatctgaccaacttgttactgcttcaataaaacttcagaaat

SEQ ID NO: 68 - DNA, 2924 bp, Rattus norvegicus (Norway rat)
atggctcagtggaaccagctccagcagctggacacgcgctacctggagcagcttcatcagctgtacagcgatagcttccccatggagctgcggcagttcctggcgccttggattgagagccaagattgggcatatgcagccagcaaagagtcacacgccactctggtgtttcataacctcttgggcgagatcgaccagcagtatagccgattcctgcaggagtccaatgtcctctatcagcacaacctgcgaagaatcaagcagttcctgcagagcaggtatcttgagaagccaatggaaattgcccggattgtggcccgatgcctgtgggaagagtctcgcctcctccagacggcagccacggcagcccagcaagggggccaggccaaccaccccacagctgccgtagtgacggagaagcagcagatgctggaacagcatcttcaggatgtccggaagcgtgtgcaggatctagaacagaaaatgaaagtggtggagaatctccaggatgactttgatttcaactataaaaccctcaagagtcaaggagacatgcaggatctgaatggaaacaaccagtctgtgaccagacagaagatgcagcagctggagcagatgctcacggccctggaccagatgcggaggagcatcgtgagcgagctggcagggctcttgtcagcaatggagtacgtgcagaagacactgaccgatgaagagctggctgactggaagaggcggcagcagatagcgtgcatcggaggccctcccaacatctgcctggaccgtctggaaaactggataacttcattagcagaatctcaacttcagacccgccaacaaattaagaaactggaggagctgcagcagaaagtgtcctacaagggggaccctattgtgcagcaccggccaatgctggaggagaggatcgtggatctgttcagaaacttaatgaagagtgccttcgtggtggagcggcagccctgtatgcccatgcacccggaccggcccttagtcatcaagactggtgtccagtttaccacaaaagtcaggttgctggtcaaatttcctgagttgaattatcagcttaaaattaaagtgtgcattgataaggactctggggatgtcgctgccctcagagggtctcggaaatttaacattctgggcacgaacacaaaggtgatgaacatggaggagtccaacaacggtagcctgtctgcagagttcaagcacctgaccctgagggagcagagatgtgggaatgggggccgtgccaattgtgatgcctccttgattgtcactgaggagctgcacctgatcacctttgagacagaggtgtaccaccaaggtctcaagatcgacctagagacccactccttgccagtcgtggtgatctccaacatctgtcagatgcctaatgcttgggcatcaatcctgtggtataacatgctgaccaataaccccaagaacgtgaacttcttcactaagcctccgattggaacctgggaccaagtggccgaggtgctgagctggcagttctcgtccaccaccaagcgagggctgagcatcgagcagctgaccaccctggccgagaagctcttagggcctggtgtgaactactcagggtgtcagatcacatgggctaagttttgcaaagaaaacatggccggcaagggcttctcgttctgggtctggctagacaatatcatcgaccttgtgaaaaagtatatcttggccctttggaatgaagggtacatcatgggtttcatcagcaaggagcgggagagggccatcctaagcacaaagcccccgggcaccttcctgctgcggttcagtgagagcagcaaggaaggaggggtcactttcacttgggtggaaaaggacatcagtggcaagacccagatccagtctgtagaaccatataccaagcagcagctgaacaacatgtcatttgctgaaatcatcatgggctataagatcatggacgctaccaacatcctggtatccccactggtctacctctaccctgacattcccaaggaggaggcattcggaaagtattgtcgccccgagagccaggagcaccctgaagctgacccaggtagtgctgccccttacctgaagaccaagttcatctgtgtgacaccaacgacctgcagcaataccattgacctgccgatgtccccccgcactttagattcattgatgcagtttggaaataacggtgaaggtgctgagccctcagcaggagggcagtttgagtcgctcacgtttgacatggatctgacctcggagtgtgctacctccccgatgtgaggagctgaaaggcaaagctacagagtatgactgagacactgcccatgtcaccttagcagcaactcagatcactgaactcactgtgtccagattttttctttaacctcctacttctgctgtctttgggcagtctgggtactttttaaaatagagaactgagtgagcgtgggtgatgcgctcttatgtgaggaggagggcacctcttgagtccgtgatggctgtgaaagcagagggctgggggggagcgaaaggaaacacctatgttctgtccgcctgtcctcctggtttgttgttgacaagcgcctcctggtgccatggcatcctgctgcccctttctgtgagctgataccccaggctgggactcccggctctgcactttcaacctggttaatgtccacatagaagctaggactaagcctataggcttctctttaagttaaaaaaaaaaaaaatactaagaattaaagggcaaaacacactgaaaacagcatagcctttccatatcaaagaaaactcgggtaacagccttttcggtgctttaagctgtcttaggctgatcatttatataaactctgcaatggttcaatcaatctgtaaagacagctgagaac

SEQ ID NO: 69 - DNA, 608 bp, Rattus sp.
taataacaagtgtacaatttagcataaggaatcggagagcctctccagagaagtcggtttctttgctgcaagaagaatgaggttctgaacccttatccaagaacagaagccatcagccaagtctccacatttctctgcaaaatgttgtagcctctataactgtatgatagtgtaatgcatgccttcagttgtaagtggccagatcgcgctacagtgacattgaaacctgctctctaattggccctgtacagtttgcttatttataaattcatttaaaacactacagctgttgaatggttacaacctacgcctccggtcctaacttcagttgttctcctcggtgtgcagccagctgttccacactgtattattgtaacttatttagtgaagtcagaagcagtagacagatgttggtgcaatacaagtattgtgtgcatttatcgtaataaagtgctccgcgtcggttcagttcctcacagcttctcacagtgcatgtctgactgtagtctgtaaatagaggtcagtgtccgtgctgctaacaggtatcgatcgcacagacatgatttcaggtaaataaatcgattctacgataaatgggtaaaagaaaa

SEQ ID NO: 70 - DNA, 1451 bp, Rattus norvegicus (Norway rat)
gccaggcgccctgccgctggacactgtagaacggcgggcggaacgcagacctgggttcgggctgttgcagtgtccgccggagcggtttggggagtgcacggggtgaagatggcggaggagcggcaggacgcgttgagggagttcgtggcggtgacgggcgctgaggaggaccgggcccgtttcttcttggagtcagctggctgggacctgcagattgcacttgcaagcttttatgaggatggaggggatgaagacattgtgaccatttcacaggcaaccccaagttcagtgtccagaggcacagctcctagtgataatagagtaacatccttcagagacctcattcatgaccaagatgaagaggaagaggaagaagagggacagaggttttatgctgggggctcagagagaagtggacagcagattgttggtcctccccggaagaaaagtcccaacgagctggtggatgatctgtttaagggtgccaaagagcatggggctgtagctgtggaacgagtgaccaagagccctggagagaccagtaaaccgagaccatttgcaggagggggctaccgccttggagcagcaccagaagaggagtctgcctatgtggcaggagaaaggaggcggcattcaggccaggatgttcatgtagtgctaaagctctggaaaactggattcagcctagacaatggtgaccttagaagctaccaagacccatccaatgcccagtttctggagtctatccgtagaggggaggttcctgcagagcttcggaggttagctcacggtgggcaggtgaacttggatatggaggatcatcgggacgaggacttcgtgaagcccaagggagctttcaaagccttcactggcgagggccagaaactaggcagcacggccccgcaggttttaaacaccagctctccagcccagcaagcagaaaatgaagccaaagctagctcgtccatcttaatcaatgaggcagaacctaccacgaacatccaaatccgactggcagatggcgggagactggtgcagaaattcaaccacagccacaggatcagcgacatccggctcttcatcgtggatgcacggccggctatggctgccaccagttttgtccttatgactaccttccctaacaaagagctggctgatgagaaccaaaccctgaaggaagccaatcttctcaacgctgtcatcgtgcagcggttaacataaccgcccagctgctgcctcacctccctatgtgtcccccatgactgtggccatgcccgtggggattacctcctgccccctgtacacctagctcttccagtgccacgtctcgtccgtagctctggattcttagacttcagttggacatttgttttctctttagttgtatttcctgggtttttgtgatgatcaatggactttaaagaaaaaaaataaaaaacacaaaaaattgg

SEQ ID NO: 71 - DNA, 2015 bp, Rattus norvegicus (Norway rat)
gtgagagttcctttatacgttacacattcctcctctaagacgagaccactccaggctgaaagtagtgaagattttaaaacttactctgatgaaaactttctttttaaaacagggcgccatcgttgtattggagaaaattttgcctatgttcaaattaagacaatttggtccactatgcttcgtttatatgaatttgacctcatcaatggatattttcccagtgtgaattatacaacaatgattcataccccagaaaacccagtaatccgttacaaacgaagatcaaaatgaagaaaggaacaaggagccagtgtggagacgggactgcaagctgcagcttggcagagaatgaagctttgacacagctttcatactgtactgttttttaagtgtgtggttctgaaagccagtttgattttaatgttttattaactcggtgatttttgtcagacctaatggcatttgaaacagttataatagttctgataggatttcagggaagccaagtttatgttagaaatcgtttaggggagcctcggtattcagagatgatacagaatatagcatccaggtaactaacttcagaagcacacgttgccgtagggagattccggcttggaactagtttgggaagttttaagcctggtcagatgctacagaggcaatgggtcattggtgtggttgggccacttctgtgcgtaaagatgtgagagggtgaaggataagttttctgcgaagctctagatggtgtgagtgccctttgtagtgttaactgagagcaccactccagcgagatggcagcaatcttggaccttatcttgataaccttatttcctaaaaataataaatactaaagagtacttatgttattggttccagaaaaatccaaaatcaaatccttgtggaatttttaattttaattaaaaaaaaaaaaaaacaagtaccatgattttaaaagtgtatgattctgagcttagtgaattctggccttgagattgaggaatggggacatggtatcattgcccgtgttctttggaggctgtgctcaggagccaacctaacagattgttaccatgggcctaattctgacctgcccataatctgtattaggaatcaagagatctgttgctgggtgtggtgctgcacacctgtaatactagtgctcgggctgaggcagaaggattgagagtttgaggccaacctagagctacatagcaagacttaacaccctccccaaaataaaaccttttttctctaaagtatgtgtactggctggtcttaggtgacaacctgacacacgctagggtcatcagagaaaagggaacctcagttgaggaaatgctgtaaggatgcttagtggtcaatgagagagggcccagcccactgtgggtggttccacccctaggctggtcatcctgggtcctaagaaagcaggctgactaagacaccaggagcaagacagtaagcagcatccttcatggcctctgcatcagctcctgccttaggttcctgacccgcttgagttcccgtcctgactttctttgataatgaacagtagtatggaagtgtaagccaaataacccacccccaccctcccaacttgctttttgctcatggtgttttgtagcaatagaaaccctaactgttacagctgtaagaggcttttgaagactcttcaaatgaaggcccaaatctctgctgttaaaggtttcagattaaaattctctatgagaaaagttttgctggtctatattcatggatttgaagctgtgcttcagtaagtacagttcaagaggtctgggaatggggttggggatttagctcagtggtagagcgcttgcctaggaagcgcaaggccctgggttcggtccccagctccgaaaaaaagaacaaaaaaaaaagaggtctgggaattcagaaacttagatcctatttgcctgaaatcggctcccttcagtattacctttagttatttagataagtcactctcgtgatccgttgacctgcaggtcgac

SEQ ID NO: 72 - DNA, 5990 bp, Rattus norvegicus (Norway rat)
gaggaagcaaagaccgggcaaaacacatgaaggaaaatttggaacttcttttataatatcaacaagacatttggggccaaataaatcctctccgttacacaaaaccaaaaatggcatacaattggcaaacagagccaaaccgtgctgaaccacaggaaggtggacatgatcaccagcagtgtcaccatgcagaccagcacctttcttccaggcaagtcaggttgggttttgatcagcttgtggaagagctcagtaacaaaactccactgcctgaggatgaaaaagaaggcacgtgttttgtaccagatacaccaaacttggattcaaaatggcaatccatatatggaccccacccaaggcacttcaatgaattcacttctcagagtccccacttctcccagcttccttttggaaaagcatcagccattggttttaatcctgctgtattacctgcacatcagttcattcatgagggagcctcctggagaaatcccacaagaaaatatcatggtggtgaggatcccaggttcagtgctctaactccgtcatccactggcttggataaatgtcatcaacaaggacaatcagggaccgaacattgtaactattatgtggaacctgaaaacaatgttccccatcattattcaccctactcaatggactccatacccgatagtgaggaaaaaggaagtggagatgcggatcttgtagaaccttctctggtgttctctaaagactcctttctacccagggcatcggagaacatgtcagtggaaagcacagagcccattggttgcccccttgaaatagttgaagcaccccaagggagtaacaagagcctcgcctccttttgcaacaatgtaacaaaaataagaggactatatcatgcaagtgacactaattccaattccggaaagatctgggccatcaccacagcctatccatctcggctcttcgctgacacccagttcagagttaaaatttccactgataactcggcacaacttcttcttcttaagccacccgctaattatcttgtcaaagacctaattgccgaaattctacttttatgtgcaaatgagcagctttcccccaaagagtatcttctaagtatatgcggttctgaggaatttttacagacggatcactgtctagggagccacaaaatatttcagaaaagtaaatctgtcattcaactccatctccagagaagcagggacactccaggaaaattatcccggaagagggatgatgaccgcagtcgggtccatctgaaccaacttctagaatttacacatatttggaaaatatccagacaatgcctctccacagtaatgaaaagctacaacctccatgtcgagcacctgttgaaaacccaggaagatgtggaggagaaacctctgtcatccatgttttcctgtggccgacaccctcctcagccacatgggaatgacattattgaagatgttagaaacatatgcagtgttctggggtgtattgaaaccaaacaagtttcagatgcagtaaaagaactaactctaattctgcagagaccatcacagaattttcatcagaattcagagacttcaaaaaaaggcttcatagagaacgtgacatcggaactgtcgaggtccctccatcagctggttgacgtgtactgcagtagcttttgtacagatttccggcctgcgcgcgcacctggaggcgtctcccgcgaccacgctgggctccactcccacctgagcttcacggtgtgttccctgcacaatgttccagaaacttgggcacacagctacaaagcattttcattttcctgctggctcacatatgctgggaagaagctgtgccaagtgaaaagctgcagatccctgccagtcacaaagtcattctctttttcggtgaactggaatgaaataatcaattttcctcttgagataaagtcacttccaagagaatccatgctcgttataaagctgtttgggattgacagtgccacccacagcgcaaatctgctggcctggacctgccttccactatttccaaaagaaaagtctccgctggggtctaggcttctcagcatgacactacagagtgagcctcctatagaaatgatggctccaggagtatgggatgggagccagcctaccccactgaccctgcagatagattttccagctgccacgtgggagtacgtgaaacctgagactgaagagaacagaactgaccaccaagagcctccaagagagtgtttaaaacacatcgccagactctcccaaaagcagcctcccttgctactttctgtggaaaagaggagatatttgtggttttatcgtttctactgcaacaatgagaactcctctctccctctggtcttgggcagcgcccctggttgggatgaagggacagtttcggaaatgcatgccgtcttgagaaggtggacattttcccatccgttggaagctcttggccttttgacttccaggtttccagaccaagacattcgtgaagttgccgttcaacagttagacaacttcttgaccgatgagctgctggactgcctcccacagctagttcaggctgtcaagtttgagtggagtctcgaaagtcccttggtggaactcctgcttcatcgatccttgcaaagcatccgagtggctcaccgcctgttctggctgctgcgggatgcacaaggtgaagactactttaaaagctggtaccaggagcttttggccgctctccagttctgtgcaggagaagccctgatcgaagagctttccaaagagcagaaacttgtcaaactcctgggtgatattggagaaaaagtgaagtcggctggcgatgctcagagaaaggatgtgctaaagaaggagattggcagtctagaagaattctttaaagatataaagacttgccatcttcctctgaacccggccctgtgcgtaaaaggaattgatcgggatgcatgttcatatttcacatctaatgccttgccattgaagatcactttcatcaatgctaatccaatgggcaaaaatatcagtgttatttttaaggccggcgacgatcttcggcaggatatgcttgttctgcagattattcaagtgatggacaacgtttggcttcaggagggcctcgatatgcaaatgatcatttatggatgtctagccacaggaaaggctcaaggattcatagagatggtgcctgatgctgtaacgcttgccaagatccatctgcactctgggctgataggacccctgaaagaaaacaccatcaagaagtggttcagtcagcacaaccacttaaaggaagattatgaaaaggccttgaggaactttttttactcttgtgctggctggtgtgtggtgacattcatcttgggagtctgtgaccgacataatgacaatatcatgctgacaaagtcaggccacatgtttcatattgactttggaaaattcttgggtcacgcacaaacatttggcggtataaaaagggaccgagcgcctttcatttttacttcagagatggagtactttattacggagggtgggaaaaacacacagcattttcaagacttcgtggaactctgctgcagagcctacaacattgtgaggaagcacagccaactgctcctgagccttctagaaatgatgctgcatgccgggcttcctgagctgagggggattgaagacctgaaatacgtacacgacaatctccggccacaagacacagacctggaagccacaagtcattttaccacgaagataaagcagagtctggagtgcttcccagttaaactgaataacctgatccacacgcttgcacagatgccagccttcagccttgccagacctgcccctcagactcctccccaggagtgctgcgtcctgaataaaaccaggacaattcagagagtcacaattttagggttcagcaagacacacagcaacctgtacctgatcgaggtgacacgcagcgacaacaggaaaaacctggccaaaaagtccttcgagcagttttacagacttcacagccagattcagaagcagttccccttgttgactctcccagagtttcctcactggtggcatctacctttcacagactcgcaccatgagagaatccgagatctgagtcactacgtggaacaggtgctgcacggatcttacgaagtcgcaaacagtgattgtgtactcagtttttttctctctgaacatatacaacagacccttgaagactctccatttgtggacccaggtgaccattctccagacaagagcccccaggtgcagttgctgatgacctatgaggacacaaagctcaccatcctagtgaaacacttgaaaaacatccatctcccagatggctcagcgcccagcgcacatgttgaaatttatcttctgccacatcccagtgaagttcgcaggaagaaaacaaagtgcgttccaaaatgcactgacccaacttacaatgaaattgtggtatatgatgacgtctcaggacttcagggacatgttttaatgctcattgtgaagagcaaaactgtatttgtgggagcggttaacattcagctctgcagtgttcccctcaatgaagaaaagtggtacccattagggaacagtatcatctgaccaatgccatgaatgtatgcattattgattaagtacttgtgtgttttcagcttccatttcccctatagcatacacaaggcatctttcttgcggaagatggcttggagcagtggttctcactcagcgtccctaacactgcgaccctttaatacaattcctggtgattgtagtgacccaaaccacaaaattattttagttgctatttcacaactgtaattttgacacggttatgaattgcaatgtatatatctgatctacaggatacctactattcgacccctgtgataaaagggtcattggacaatcccaaagggtcatgactcatgggttgagaaccacaggcttagagtggtcacagaagaagcagatcaaaatcagtcttttgtagctctttcttctctaccttctccttattttcttatcatattttctccttggaatattcatcatggaaaatcccatatgcaaagtcatgaaagaatgattcatttaatatgcatttttgaatcaaactaagttcatgtcttgccttaattgcttgttgaggtcaaaattatacttttagggtgttttctaaagctaggagaagctcatgtaagggttaagaatatttgcaatatatttcaaaagttaaatatgtgtacaagccacatatctagtcatgattgaatttattgagagaattggtgatctccaaccatgtgctataatttttctatcaaaaaaaaatccctaagatttttctattgcatagattttttttctttaagaatttcatgcatgtatatagtgctttcgttattgtagcttctctcttttttagttgtccccacacccatcaacaactgttcttctctaaaactcctgtattcctgtggggagttttatttttaagatgggcatcaaactatatatcccagctgacctagagcttgctatgttgaccaggtgggccccaaatcacagtggtcctcctgcctctgtttcccgaccgctaaggttccaggtcattggatcttgtctgtaatttttaagttcagttcttagaatttgatattgatcaatccagtgtcattgtgtcttccagcctcggtcatgttcacaccttaaatcttattaatctccaaacccaaaatatccaacttttaagttcaccatttaaaacgcctctttgcgtgttaaatactctcactgcacttgaaccaacaccttgtgttcgcacggaccagatagatgatctcacagtttgtcacctgtgtaacaggcaaacccagaggacgcctccaagataatcaaactggaggtttcaaaaataaaacatctgccataaaaaaaaaaaaaaaaaaaaaaaaaaaaaaaaaa

SEQ ID NO: 73 - DNA, 5728 bp, Rattus norvegicus (Norway rat)
gctctgggacagagtctcatactgatgaacggagagcactcaatggccacgcctggagagtcctgcgcaggcctgagggtctggaaccagacagaacaggagcctgtggcctatcacttgctcaacctgtgcttcctgcgagccgccgggagctgggtgccccccatgtacctctgggtccttggccccatctacctcctctacatccatcgccatggctgctgctacctccggatgtcccgcctcttcaaaatcaaaatggtgctcggctttgccctcatccttctctacaccttcaacgcggccgtgcctctctggaggatccaccggggcatgccccaggccccagagcttctcattcaccctaccgtgtggctcaccaccatgagcttcgccaccttcctgatccacatggagagaaagaagggggtccgtgcatctgggttgttgttcgggtactggctgctctgctgcctcgtgccagccatcgacactgtccagcaggcctccgcagggagcttccgccaggagcccctccaccacctggccacctacctgtgcttgtccctggtggtggcagagctggtgctgtcttgtctggtagaccagccacccttcttctcggaagactccaagccattgaatccatgtccagaggccgaggcctcttttccctccaaggccatgttctggtgggcctctggactgctatggaagggctacaggaaactgctggggccaaaagacctctggtcacttgagagagaaaactcttcagaagaacttgtttcccagctggaaagagaatggaggaggaacttcagtgagctgccggggcacaaagggcacagtggtatggggacccccgagacagaggccttcctgcagccagagaggagccagcggggcccgctgctcagggctatctggcgtgtgttccggtccactttcctgctggggaccctcagcctggtcattagcgatgccttcaggtttgctgttcccaagctcctcagtctgtttctggagttcatgggcgacctcgagtcctcggcttggacgggctggctcctggctgtgctgatgttcttgtcggcctgcctacagacactgtttgaacagcagtacatgtacagagtcaaggtcctgcagatgaggctgcgaacagccatcactggcctggtgtacagaaaggtcctggtcctgtccagtggttccagaaagtccagtgcagcaggggacgtggtcaacctggtgtcagtggacgtacagcggctggtcgagagcatcctccacctcaacgggctgtggctgctcttcctgtggatcattgtgtgctttgtctacctgtggcagctccttgggccctctgccctcacagccgttgctgtcttcctgagccttctccccctgaacttcttcattaccaagaagaggagcttccatcaggaagaacagatgaggcagaaggcctcccgagcacggctcaccagctccatgctcagaactgtgagaaccatcaagtcccacggctgggagtgtgccttcctggagcgactcctgcatatccggggccaggagctaggtgccctgaagacctccgccttcctcttctctgtgtctctcgtgtccttccaagtgtctacatttctggtggcgctggttgtgtttgctgtccacaccctggtggcagaggacaacgccatggatgcggagaaggcgtttgtgacgctcacggtgctcagcatccttaacaaagcccaggccttcctccccttctctgtgcactgcctcgttcaggctcgggtgtcctttgaccgcctagctgctttcctgtgcctggaagaagtagaccccaatggcatggtcttgagtccctccagatgctcctcgaaggatcgaatttctatacacaatggcaccttcgcttggtcccaggagagcccgccctgcctgcacgggatcaacctcaccgtgccccagggctgtctgctggctgttgtgggtccagtgggggctggaaagtcctccctgctgtctgccctgcttggggagctgttgaaggtagaagggtctgtgagcattgagggttccgtggcctacgtgcctcaggaggcttgggtccagaatacctctgtggtggagaatgtgtgcttcaggcaggagctggatctgccatggttgcaggaagttctagaagcctgtgccttggggtctgatgtggccagcttccctgcaggagttcacaccccagtaggggagcagggcatgaatctttctgggggccagaagcagcggctgagcttggctcgggctgtgtacagaagggctgctgtgtacctgatggatgaccccctagcagccctggatgcgcatgtcagccaggaagtcttcaaacaggtcattggccccagtggacttctccaaggtacgactcggatccttgtaacacacacgctgcatgtcctgccccaagctgaccagatcctggtgctggccaatgggaccatcgcagagatgggctcctaccaagaccttctgcataggaacggagccctggtgggtcttctggatggagccagacagcctgcaggcgaaggagaaggagaagcacatgctgcagccaccagtgatgaccttggaggcttttctggaggtgggacgcccacgcgcagaccagagaggcccagacccagtgacgcagcccctgtgaagggcagtacttcagaggcacagatggagccttctctggatgacgttgaggtcactggactgacagcaggagaggacagtgtgcagtatggccgggtgaagagcgccacatacctgagctacctgcgggcggtgggcacaccgctctgcacctacaccctgttcctcttcctctgccagcaagtggcgtccttctgccaaggctactggctgagcctctgggccgacgacccggtcgtggatgggaagcagatgcattcagccctgcgtggctccatctttggactccttggctgtctgcaagccatcggactgtttgcctccatggctgcggtgttcctgggtggagcccgagcttcatgcctgcttttccggagcctcctctgggacgtggctcgctctcccattggcttctttgagcgcacaccagtcgggaacctgctgaaccgtttttccaaggagacggacatagtggatgtggacatcccagacaagatgaggaccctgctgacctatgcctttggactcctggaggttggcctggcagtgtcgatggccacaccactggctattgtggccatcctacctcttatgctcctttatgctgggtttcagagcctctacgtggccacatgttgccagctgagacgcctggagtcggccagttactcctcagtgtgttcccatctggctgagaccttccagggcagtcaggtggtcagggccttccaggcccaggggcccttcacagctcagcacgatgccctcatggatgagaaccagaggatcagtttcccgaggctggtggctgacaggtggctggctgccaacctggagctcctggggaatggcctggtgtttgtggccgctacatgtgctgtgctgagcaaggctcacctgagtgctggcctcgcgggcttctcggtttctgctgccctccaggtaacacagactctgcagtgggtggtccgcagctggacagatctggagaacagcatggtggccgtggagcgagtacaggactacgttcacacccccaaggaggctccctggaggctgccctcctctgcagcccagcctctctggccctgtgggggacagattgagttccgagactttgggctcagacaccgaccagagctgcccatggctgtgcagggtgtgtccctgaagatccatgcaggggagaaggtgggcatcgtgggcaggacaggggccgggaagtcctccctgacttggggcctgctgcggcttcaggaggccactgagggtggtatttggatcgatggggtccccatcaccgacatggggctgcacacactgcggtccagaatcaccatcatccctcaggaccctgtcctgttcccgggctcgctgcggatgaacctggacctgcttcaggagaacacagatgagggcatctgggcagcgctggagacggtgcagctcaaggccttcgtgaccagcctgcctggccagctgcagtatgagtgctcaggccagggagatgacctgagtgtgggtcagaagcagctcctgtgtctggcacgtgcccttctccggaaaacccagatcctcatcctggatgaagccactgcctccgtggacccagggacggagatacagatgcaggcggccctcgagcgctggtttgcacagtgtacagtgctgctcattgctcaccgcctgcgctccgtgatgaactgcgccagggttctagtcatggatgaggggcaggtggcagagagtggcagtccagcacagctgctggcccagaaaggcctgttttacaggctagcccaggagtcgggcctagcctgagtcaggactcttcccaaacctcctggagccagccacagagcctgcagtagctggagatgccagagactcaggggccacatgatgcccaatctaaactcctttttgggaggaagatagcagagagagtgacagagtattggaataccagacccagaagaacccagcatgcccaggttggcttgagcaaggccacacccaccccaggccaaaaagaacagtgactctcagcccaagctgtctacttcaaggccatacccaccccaggccattcaggttggatgccctggaccggggtgatggcgtgcacatatcccctaactccttattttgaggtcattgtagagttcactcacagttttaagaagccacatggagagaagccgcaaaccctctgccctgtttattccgggggtgacaccttgtccaaccctaggacaagatgaagcatcacactgactccgactgacttgtctttacctctgctgcgtgtgcatcagtgtttggactccgtgctttgtgctctcattggtttttgagacaggatttcacatagcccaggctggccctgaactcactttgttgctgaggatggccttgaacatctgatgctcctgccttccctcccaagtgctgggattatggcctgtgtcaccacgccctgtgtgggggtctcaaacaaggctttgtgtgtgcttgacaggcactcactctaaaaactgtgttacagccccggctctggattcggttctactcctgtttaaaattgtagtggtgaagggtctcttgctcaaactggcctcaaactcgagatgctcctgtctcggtctccagagtgctggaatgacagacgtgtgccactacacctgccttgactcaccacagctaagtagtgacatccccatgggccagggctggtgagtcccgtgcgtgacagtgtgctgagcagtacccttcgcttctgctcagagatgcccttctaaagctgtggcaaagagatttccacacactgccgtgcccccccaggactgcatcatgaattgatccgccctaatagcacccatgactccctgagcagtgatatgttgggttcaggagaggattcctgcttgcttcttggacagggcttgctcttccctcgaccctgaggcttctctgattggctacccttaataaaggatttacgggatttcctttc

SEQ ID NO: 74 - DNA, 555 bp, Rattus norvegicus (Norway rat)
atgactgttgcctcctgtggccatggggaagaagctggtgatggcccagaagcgcggagagactcgagccctctgcctgggggtggcgatggtcgtgtgtgccgccatcacttactacatcctgggtaccactgtgctgcccctctaccagaaaagtgtgtggacccaggaatccacctgtcacttggttgaaaccaacatcaaggaccaggaagagctggagggcaggaaggtgccccagtacccatgcctttgggtcaatgtatcagctgtgggcagatgggccatgctgtatcacacagaagacactcgggatcaaaaccaacagtgctcctatatccccaggaacctggacaactaccagacagccttggttgatgtgaagaagctcagaagtagaccaatctcttctgcacagcagcatggagtcaccaggaacggcaggggtcccgggcaggcataattctcttcctcttgtcctccatttaatttgttcaacctctttggacaatcatttcttgctcaagaatgtttaacagctctctccggttgact

SEQ ID NO: 75 - DNA, 814 bp, Rattus norvegicus (Norway rat)
atgaactctggcgtgaacctgcagaggtcgctgtcttctccaccgagcagcaaaagacccaaaactatatccatagatgaaaatatggagccaagtcctacaggagacttttacccctctccaaattcaccagctgctggaagtcgaacatggcatgagcgagatcaagatatgtcttctccaactacaatgaagaagcctgagaagccactgtttagctctacatctccacaggattcttccccaagattgagcacttttccccagcaccaccatcccggaatacctggagtcgcgcacagtgtcatctcaactcgaactccacctccaccctcaccgttgccatttccaacgcaagctatccttcctccagcaccatcaagttacttttctcatccaacaatcagatatcctcctcacctgaatcctcaggatactctgaagaactatgtaccttcttatgacccgtccagtcctcaaacgagccagcctaacagcagtggtcaagtagtagggaaagtgcctggccatttcacgcctgtcttggcaccctctccccatcccagtgcagtgcgacctgtgaccctgaccatgacagatactaaacccatcactacatccactgaagcctacacagcctcaggcacatctcaagccaatcgatatgtgggactaagcccaagagacccatccttcctgcatcagcaacagctgaggatttgtgactggaccatgaatcaaaacggcaggcatttataccccagtaccagtgaggatacattgggaattacttggcaaagtcctggtacctggg

SEQ ID NO: 76 - DNA, 2532 bp, Rattus norvegicus (Norway rat)
cccattttgcgtcgtctgggttcgggtggcggcccggctccaggcggacgcactaatcatggggtcgtcaaagaagcaccgtggagagaaggaggcagccgggactacggctgcggccggtaccgggggcactaccgagcagccgccacggcatcgagagcacaagaaacacaagcatcggagcagcggcggcggcagcagcggcggcgaacgacggaagcggagccgcgagcgtggggccgagcgcgggagcgggaggcgcggggccgaagccgaggcccgcagcggcgcgcatggtcgtgaacgaagccaagcggaaccctcggagcggcgcgtgaagcgggagaaacgcgatgaaggctatgaggccgctgccagctccaaagccagctctggagatgcctcatcactcagcatcgaggagaccaataaactccgagcaaagttggggttgaagcccttggaagtcaatgctgttaagaaagaggcgggcaccaaggaggagcccgtggcagccgatgttatcaaccccatggccttgcgacagcgtgaagaactacgggagaagctggcagctgccaaggaaaagcgcttgctgaaccaaaaattggggaaaataaagacactgggggaggatgacccctggcttgatgacactgcagcctggatagagaggagccggcagctacagaaagagaaggacttggcggagaagcgggccaagctgctagaagagatggaccaagagtttggtgtgagcactttagtggaggaggagtttgagcagaggcgacaggacctgtacagcgcccgggacttgcaaggcctcaccgtggaacatgcaatcgattcctttcgagaaggggagactgtggtcctcactctcaaggacaaaggggttctgcaggagggggaggatgtgctggtgaatgtgaacatggtggacaaggagcgagcagacaagaacgtggaacttcggaagaagaagcctgactacctgccctatgtggaggacgagagtgtggatgacttggcacagcaaaaacctcgctctatcctggccaaatatgatgaggaactggagggcgagcggccacattccttccgtttagagcagggtggcatggccgatggcctgagagaacgagagctcgaagaaatccggaccaagctacggctgcaggctcagtctctgaacactgtagggccccggcttgcctctgagtacctcagtccggaggagatggtgactttcaaaaagaccaaacggagagtgaagaaaatccgaaagaaggagaaggaggtaataatgcgggcagatgacttgctgccccttggcgaagaccagactcaggacggggactttggatccaggcttcggggccggggtcggcgccgagttcctgaagtggaggaggaggcccttgaggatgaagagaaggaccctgtggcccagccgccaccatcagatgacactcgcgtagagaacatggacatcagtgatgaggaggatgggggggctcttccctcggggcccccagagctggaggaggacgaagcggagctggagctgcagaagcagctggagaaggggcgccggctgcggcagctgcagcaactgcagcagctgcgggacagcggtgagaaggtgctggagattgtgaagaaactggagtctcgccaacgtggctgggaagaggaagaggatcctgagcggaaggggaccatcgtgttcaatgccacttctgagttctgtcgcactctgggggaaatccccacttacggattagctggcaaccgagaggagcaggaggagctcatggactttgaaagggatgaagagcgctcggccaatggtggctctgaatcagatggcgaagagaacattggctggagcaccgtcaacctggatgaggagaagcaacatcaggatttctccgcttcctctaccaccatcctggatgaagagcccattgtgaacagagggctggcggctgccctgctcctgtgtcagaacaaaggactgttggagaccacggtacaaaaggtggcccgagtaaaggctcccaataagtcactgccttcagcagtgtactgcatcgaggataagatggccattgatgacaagtacagccgacgtgaggagtacaggggcttcacccaggacttcaaggagaaggatggctacaagcccgatgttaagattgaatatgtggatgagacgggcaggaaactgactcccaaggaggcattccggcagctgtcccaccgcttccatgggaagggctcagggaagatgaagactgagcggcggatgaagaagctggatgaggaggcgctcctaaagaaaatgagttccagtgacacgcccctgggaaccgtggcactgctccaggagaagcagaaggctcaaaagacaccgtacatcgtgctcagtggcagtggcaagagcatgaatgcgaacaccatcaccaaatgaagcacctccctgtcccagatgtaatgttaaataaagttcccgccttattttta

SEQ ID NO: 77 - DNA, 1940 bp, Rattus norvegicus (Norway rat)
cacaaccaccaaatatatccacacgttgacgtgatttcttgcccttactcacactaagcccgcgtgtcgatccatctctatggatcccgaacctactgaacactccaccggcggcggctcggttccccgccagccgcccagcgcgcagacggggcttgatgtccaggttgtcagcgcagctggcgactcaggtaccatgagccaggacaccgaagtggacatgaaagatgtggagctgaacgagctggaaccggagaagcagcctatgaatgcagcggacggggcggcagccggggagaagaacggtctggtgaagattaaggtggccgaagacgaggcggaagccggggtcaagttcacaggcttatccaaggaggagctattgaaggtagctggcagcccgggctgggtgcgcacccgctgggcgctgctgctgctcttctggctcggttggctgggtatgctggcgggcgccgtggttatcatcgttcgggcgccacgctgccgtgagctgccggtacagagatggtggcacaagggcgccctctaccgcatcggcgaccttcaggccttcgtaggcccggaagcgagaggcatagctggtctgaagaaccatctggagtacttgagcaccctgaaggtgaagggcctagttttgggcccaattcacaagaaccagaaggatgaagtcaatgaaaccgacttgaaacagattgatcccgatttaggctcccaggaagattttaaagaccttctacaaagtgccaagaaaaagagcattcacatcattttggacctcactcccaactataagggccagaatgcatggttcctccctcctcaggctgacattgtagccaccaaaatgaaggaggctctgagttcttggttgcaggacggtgtggatgggttccaagttcgggatgtgggaaagctggcgaatgcatccttgtacttggctgagtggcagaatatcaccaagaacttcagtgaggacaggcttttgattgcagggaccgcgtcctctgacctgcaacaaattgtcaacatacttgaatccaccagcgatctgctgctgaccagctcatacctgtcacagcccgttttcactggggagcatgcagaactcctagtgattaagtatttgaatgccactggcagccgctggtgcagctggagtgtgtcgcaggcaggactcctgacatcctttataccggctcagtttctccgactctaccagctgctgctcttcactctgccaggaactcctgttttcagctatggggatgagcttggccttcaggcagttgcccttcctggacagcctatggaggctccattcatgctgtggaatgagtctagcaactcccaaacctcaagtcctgtaagcctcaacatgacagtgaagggccaaaatgaagaccccggctccctcctcacccagttccggcgactgagtgacctccgtggtaaggagcgctctctgttacacggtgactttgatgcactgtcttcctcatctggcctcttctcctacgtccgccactgggaccagaatgagcgttacctggtggtgctcaacttccaggatgtgggcctgtcagccagggtaggagcctccaacctccctgctggcataagcctgccagccagtgctaaccttttgcttagtactgacagcacccggctaagccgtgaggagggcacctccctgagcctggaaaacctgagcctgaatccttatgagggcttgttgttacagttcccttttgtggcctgatccctctacacagaacctgccacccttctttcctctctcaggcctttggaattctggtctttctctccttattttgtttttgtttttaaacttttgcagattacatatgaattcttacactgggtgtttttgtcttcaaaataaaaaaaatcacccctgc

SEQ ID NO: 78 - DNA, 3061 bp, Rattus norvegicus (Norway rat)
tgtgaccgcggccaagcccgctcgccttctgcggcgagtagggcctcgcggcgtcatcggcggcgaggagccgctgcggcctggccgaccatgtcggacgcggctgaggagcagcccatggagacgacgggcgccaccgagaacggacacgaggccgcccccgaaggcgaggccccggtcgagcctagccctggcagcggccccgcgactccggcggggtctgtgggcgggaccacggccgccccgagcgggaaccagaacggcgccgaaggcgaccagatcaacgccagcaagaacgaggaggacgcgggaaaaatgttcgttggtggtctgagctgggataccagcaaaaaagatctaaaggattattttactaagtttggagaggtcgttgactgtacaataaaaatggatccgaacactggtcgatcaagagggtttgggtttattctcttcaaagattcttctagtgtggagaaggtcttagatcagaaggagcacagactggatggtcgtgtcattgaccctaaaaaggctatggctatgaagaaggaccctgtgaagaaaatctttgtgggaggtctaaaccctgaagccacagaggaaaagatcagagaatactttggccagtttggggagattgaggccattgaacttccaatagatcccaagttgaacaaaagacggggttttgtttttattacatttaaagaggaagaccctgtgaagaaagttctggagaaaaaattccatactgtcagtggtagcaagtgtgaaatcaaggttgcccagcccaaagaggtgtaccagcaacagcagtatggctctgggggccgaggaaatcgcaatcgagggaaccgaggcagtggtggaggtcagagtcagagttggaatcagggctacggcaactactggaaccagggctacggctaccagcagggctacgggccgggctatggcggctacgactactcgccctatggctattacggctacggccccggctacgactacagtcagggtagtacaaattacgggaagagccagcgacgtggtggtcatcagaataactacaagccatactgagaggcagcaggagcggccgagtgacgacgcacacgctttgtttggacgcggagtgaacacaattatgtaccaaatttaacttggcaaacttttatggcctgtcccatgtgcatcttatttaaaatttcccccggaaatcactctcctgtttactattccagagctctagttgttgtaggcagcgtgtggcgtctcagaggtcagagcggcattagggggctgattttattaccaggttaccctgttctagattggagggtctgcttcctgctgccgctctgcagcctggacctgtggaccctggttgtaaagagtaaactgtatcttaggaaaccagtgtcacctttttcaccttttaattttatattatttgtgtcatacatttccagtaatggaagtgttaattttactgtactttttggtaccttttgggaatctaatgtattgtaaggtattttacacgtgtcctgattttgccacgacctggatattgaagctatccaagcttttgaaataaaaatccctgagagtctggtccactaactccagggactgtgggacagaggaacaaacaagaaagaactcgaggcctcgctgagtggcacgcttgctgagtgctgccacatcccgcaagctgagcaggtatcccaactctgttcctgcccggtagaccacccgaggtgtgagtgtggtcttgtcttccagattcgtaggacagaagctccaggaggaggacccgcccaacatggcatcggagagcgggaagctatggggtggccgatttgcaggctcggtcgaccccaccatggacaagttcaactcatctatcgcctatgaccggcatctgtggaatgtggacctgcagggaagcaaggcctacagcaggggcctggagaaggcagggcttcttcaccaaagctgagatgcagcagatactgcaaggcctggacaaggtggctgaagagtgggcccaaggcatcttcaaattgtaccctaatgatgaagacatccaccttcctcaaggtgctcattgaagccatggtagaccgggcagaggcggagtgtgaagtcctcttccctgggtacacacacttgcagagagctcagcccatccgctggagccactggatcctgagtcacgccgttgcgctgacacgagatttagagagactgaaggaggtgcagaagcggatcaatgtcctgccactgggcagtggggccattgcaggcaaccctctaggtgtggaccgggagttcctctgtgcagaactgaactttggagccattacgctcaacagtatggatgccaccagcgagagagacttcgtggctgagttcctgttttgggcttctctgtgcatgacccatctcagcaggatggcagaagacctgattctctacggtaccaaggaattcaactttgtgcagctctccgatgcctacagcaccggaagcagcttgatgccccagaagaaaaacccagacagcttggagctgatccggagcaaggcgggccgagtgtttgaagtgtctgataccatgacagctgtcctccaagtagccactggagtcatctctacactgcagattcatcgtgagaacatggcacaggcactcagccctgacatgctggctaccgaccttgcctactacctggtccgcaaagggatgccattccgccagcccacgaggcctcagggaaagctgtggtcgtggcagagatgaaaggggtggctctcaaccagctgtcacttcaggagatgcagaccgtcagtcccctgttctcgagtgacgtgaatctcgtgtgggactacagccacagcgtggagcagtacacagccttgggtggcacagcacagtccagtgttgagtggcagatcagccaggtgcgggccctgctgcagatgtagcagccctagattccacccagtcaaagctgcgccccaataaagtggagccctggagaggccgccat

SEQ ID NO: 79 - DNA, 1334 bp, Rattus norvegicus (Norway rat)
gagcgccaggccaatcggaggtgctgttgtttgtcagtcccggagccggtccgcaaaggaaaggtggcaagatggtgttggagagcactatggtttgtgtggacaacagtgagtacatgcggaatggagacttccttcccacccggctgcaggcccagcaggatgctgtcaacattgtatgtcactcaaagacccgaagcaaccctgagaataacgtgggcttgatcacgctggccaatgactgtgaggtgctgaccacactcacccctgacactggccgaatcctctccaagctccacactgtccagcccaaaggcaagatcaccttctgcactggcatccgcgtggcccatctggctctgaagcaccggcagggcaagaatcacaagatgcgcatcatcgccttcgtgggtagccctgtggaggacaacgagaaggatctggtgaaactagctaaacgccttaagaaagaaaaagtgaatgttgacatcatcaattttggggaagaggaggtgaacacagagaagctgacagcctttgtgaacacattaaacggcaaggacggaactggatcacatctagtgacagtgcctcctgggcccagcctggccgatgctctcatcagttctcctattctagctggggaaggcggcgccatgctgggtcttggtgccagtgactttgagtttggagtagatcccagtgctgatcctgaattggccctggcccttcgtgtctctatggaagagcagcggcagcggcaggaggaggaggcacgacgggctgctgcagcctctgcagctgaggctggaattgccacacctgggactgaaggtgaacgagactcagatgatgccctactgaagatgaccatcagccagcaggagtttggccgtgcggggcttcctgacctaagcagcatgacagaggaagagcagattgcctatgccatgcagatgtccctgcagggagcagagtttggccaagcagaatcaggggacatcgatgccagctcagccatggacacatctgagccagtcaaggaggaggatgactatgacgtgatgcaggacccagagttccttcagagcgtcctagagaaccttcccggtgtggatcccaacaatgaagccattcgaaatgcaatgggctctctggcctcccaggccaccaaggatggcaagaaggacaagaaagaggaagagaagaagtgaggccggagggaggggtagccgagtctgccctggggactgtaaggatggggttggataaagacttagatgtgctctgcggccttgacaacggaataaagcttggagttttccctttgcttc

SEQ ID NO: 80 - DNA, 853 bp, Rattus norvegicus (Norway rat)
ggccacgcgtcgactagtacggggggggggggggaatgaggcggaccatctgaccccgctcgctcgctccacgcgctggcacgggagcgacagccaactgcagagcgaattcctctcacgccagtcactcagagcaatgaaactgtaacagttgttttcccaaatactgtacgatggtacgactgaccagcaacttccttttgttttgtattatatatatctttaaaatatcttgtcagttttactatgtatgttcatccattcaccaaagccctcaaaaagaagtttctccacagaacaggcacctcaggctctgtcccaaggaatgtgttttaatttttgcccggataaaagaaaataagctttgcacacactctcgattctttatttgcaggcaaacttcactctttattatctgaaacttttccattctcagcctcttagaggcacagatggctcaagtttcagtggcaaaaaagtctttttttttttttctttctgtaaccaaactagagcaaatttggaattcagtctgggactaaaacgtcacagcagaaaaaaaatgaaaaaaaaataatttgctttttctttctttcatttagcagcataaataagtttggccactgggagtacagtacaggggttgggacaacgatcccgtatttgaagacctacttctagcaccagcatcaagaactaaatccacctcaggactcacagaacccaggacaacttgccatctttgagcaacatatgcattgaagagtgtatatagaagcaacagtaaatagattaacagaggctaatactgtgattgattgacattggcaatggttggcaaaaaaaaaaaaaa

SEQ ID NO: 81 - DNA, 1356 bp, Rattus norvegicus (Norway rat)
ggagactgtcttttccaacccgacatggatgtgctcccaatgtgtagcatcttccaggaactacagattgtgcacgaaacgggctacttctcggctctgccgtccctggaggaatattggcaacagacctgcctggagttggaacgctatcttcagagtgagccctgctacgtgtcagcctctgagataaaatttgacaaccaggaagacctgtggaccaaaatcattctagcacgggagaggaaggaggaatcagaactgaagatttcttctagtcccccagaggactctctgatcagctccggctttaattataacttagagaccaatagcctgaactctgatgtcagcagcgaatcttcagacagttcggaggaactttcgcccacgaccaagtttacctctgaccccattggtgaagtcttagtcaattcaggaaatctgagttcctcggtcatttccacacctccttcttctcccgaagtaaatagggaatcttctcaactatggggctgtgggccaggagacctgccctcacctgggaaggttcgaagtgggacctcggggaagtctggcgacaagggtagtggcgacgcctccccagatggcagaagaagggtacatcggtgccattttaacggctgcaggaaagtttacactaaaagctcccacttgaaagcacatcagcgcactcacacaggagaaaagccttacagatgctcttgggaaggttgtgagtggcgttttgcaagaagtgatgagttgaccagacacttccgaaagcatactggtgccaagccctttaaatgctctcactgtgacaggtgtttctccaggtctgaccacctggccctgcacatgaagaggcatctctgagggagcagaggatgaatcctgtaggctaaaagaggcttccaggctaagaggcggccatggaaggagggatacctgtaccagccaaagcatgccattgcttcctacccagttacctccagaggcctctctttggaaggtcttttgagggctacaaaagtcatgtcagaagcggcatagcacccacggtgcatggtgtttgggtgaccccggactcaccactggtttctaaccttctgagaggctctaagcttttcgccgtgagcatgcgcactgagaatgttaatgggtgggaatgactgactgtatgttgaggatctattactgactgtatggcgaggcagactttttttttccccccttgtggtagcaaatacctgcaagagacagaaaaaaaaagcagtttgaatgttttgtgtgtgaggagtattccaagggatgagttgaccaccaatcatttcctgaagggtgtctgcaccttag

SEQ ID NO: 82 - DNA, 2436 bp, Rattus norvegicus (Norway rat)
agctttccggggcagcgagtggcggggccgggtgctgagcgagcggggcgtggagagcgtcgcgcggcccctcgcgccgggctccgtttgcaggccacagcccccgcgaggtggcccgccggccctgggccgcccgtcctctggcagctgtggtgagcgcagcgtcgggccggcatgaaggtcacgtcgctcgacgggcgccggctgcgcaagatgctccgcaaggaggcggaggcgcgctgcgtggtgctcgattgccggccctacctggccttcgccgcgtcgagcgtgcgcggctcgctcaacgtcaacctcaactccgtggtgctgcggcgggcccggggcggcgcggtgtctgcgcgctacgtgctggccgacgaggcagcccgcgctcggctgctgcaggagggcggcggcggcgtggcggcggtggtcgtgctggaccagggcagccgccactggcagaagctgcgggaggagagtgccgcgcgcgtcgtcctcacctcgctgctggcctgtctgtccgccggaccgcgggtctacttccttaaaggtgggtacgagaccttctactcacagtatcctgagtgctgtgtggatgcgaagcccatttcacaagagaagctcgaaggtgaaagaggcctcctcagccagtgcggaaagcccattctcagcgtcgcctacagaccagcttatgaccagggtggcccagttgaaatccttcccttcctctaccttggaagtgcctaccatgcatccaagtgcgagttcctcgccaacctgcacatcacagccctgctgaatgtttcccgccggacctctgaggcctgcacaacccacctacactacaagtggatccctgtggaggacagccacaccgccgacattagctcccactttcaagaagcaatagattttattgactgtgtcagggaagagggaggcaaggtcctggttcactgtgaagccggggtctcccggtcgcccaccatctgcatggcttacctcatgaagaccaagcagttccgcctgaaggaggccttcgagtatatcaagcagaggaggagcgtggtctctcccaactttggcttcatgggacagctcctgcagtatgagtctgagatcctgccctccacacccaccccccaacctccctcctgccaaggggaggcagccagctccacctttataggccacttacagacactgagccctgatatgcagggtgcctactgcacattccctacctcagtgctggcaccggtgcccacccacgccaccgtcgcagagctccacaggagccccgtggccacagccacatcctgctgagaccggtcggctaccagcgcatccccaagagcaactgtgacctttggattttttaaacttgtggacatttcatacccgtgcaatactgaagacctctctctgtcccgctgccccggtgagatggtgaggggtcagcaggcttgcagatgcacttcaggctaacccggaggatggtttctcgcgattgtaggaaggccaagccatgcccccctagcacagcggcgtgctaactactgtacttccagaagccccgcccactcaggaccgcctcatccttgcacctcagaagtcccggcttctcatttcaagtgtaaggcaatacacagtcgcagcaaagtaggagcaagctgtgctggaccaggaggggaggagtccgcccgtctgggaggaagcacaagtttcactgttaatttgaatttcggccaactttgtctgtctctgtcctctgtcacttcagggaagagagctggtcaccgctcagtcagaaaagttaaccccgctggatttgtcaagacaaaaggacctgcccgtctgaacccagtgtttctgaggttctgtctaggatcccatggaagctgttggtgtaaggagaagctcctgactcattggagtttcttgctcaccgagggctccttggtgaccttggactttggcatggtttttacaaatacttgaacctgtcccattgtatctctccctaaagcacctctggtgtcattcagaaagttgtcagaccctagaccaaaaaccacccctttgagggggtagcaggaactgcctgcgttctgggtcagtggtggtgactgacatactttttcagtttagtgtcctgtgtgctttttttgtcatccattgtgacaatgtttccctccctaccctggggagtcgttttcaaactactgattctggggtctgcatcgtttgcaatgtggtactactatgtccttcgtagattgtttttccaaggggggaaaggcaataagtcacccccaaacccatgtgaatgtgaagaaaagcagtgttgatgttttttttatatatatatatatacatgtagtacaaaattaaaaaaatgtcaaaaaataaaaataaaaagtgctaagtgaa

SEQ ID NO: 83 - DNA, 2150 bp, Rattus norvegicus (Norway rat)
actcgcgctccccgagtgccacatcactgcgccctcccgcgcatccgcgcatctgtgcccaccatgcctacaacgccgctgctgctggctgcgctagctgctttggccgcgctggccgttgctgcgtaccccagctgctcgcctggacctgacccctccggtaaatgtcagagactggcctccacacacagtgccacctgtgtggacctgcatctcaggacctgtgcggatgcggcctataaccatacatcgttccccacacccctggagcaccgttcgtgggaggcagtggaggccagccctgaatacacactgttgggtgtgctgcactttctcctggagggtcagtgcaaccctgatctgcggctgctagggtgctctgtgctggcccccagatgccaaggaggccacacacaaaggccctgccgccgtgtctgtgagggcctgcgggaggcctgccagccagcctttgacgccatcgacatggcctggccctacttcctagactgtacccaatactttgcaccagaggaggaaggctgctatgaccctctcgaacagctccggggagagctggatgtcgaggaggctctgccctctggcctgccacctaccttcattcgctttgcccaccactcctatgctcagatggtccgggtactgaagaggacagcggctcgctgctcccaggtggccaagacgtacagcatcgggcgcagctttgaaggcaaggacctggtagtcatcgagttctcaagccgtccaggccagcatgaactgatggagcctgaggtgaagctcattgggaacatccatggcaacgaggtggcaggacgggaaatactcatctacctggcccagtacctgtgctccgagtacctgctgggcaacccccgtatccagcgcctgctgaacaccacccgcatccacctgctgccatccatgaaccctgatggctacgaggtggcggctgcagagggtgctggctacaacggctggaccagtgggaggcagaatgcacagaacctggatctgaaccgcaacttccctgacctcacgtcagagtactaccggctggcctccactcgcggtgtgcgcacggaccacatccccatctcgcagtactactggtggggtaaggtggcccccgagaccaaggccatcatgaagtggatacagaccattcccttcgtcctctcagccagcctgcatgggggtgacctggtggtatcctaccccttcgacttctccaagcacccccatgaggagaagatgttttctcccactccggatgagaagatgtttaagctgctggccagagcctatgctgatgtccaccccatgatgatggacaggtcggagaacaggtgtgggggcaacttcctgaagcgggggagcatcatcaacggggcggactggtacagcttcactggaggtatgtctgacttcaactacctacacaccaactgctttgagatcacagtggagctgggatgtgtgaagttcccaccagaggaggcgctctacggcctgtggcaacacaacaaggagcccctactgaacttcctggagatggtacaccgaggaatcaagggtgtggtgacagataaatacggaaagcccgtcaaaaacgcacggattctagtgaaaggcatccgccatgacgtcaccacagcccctgatggtgactattggagactccttcccccgggttcgcacatcgttattgctcaggcccctggctactccaaggtaatgaagagagtcaccattcccttgcgcatgaagagggccggccgtgtggacttcatcctccagcctctggggacaggacctaagaacttccttcctggaccttcaagagccttacctcggtccctggatccacagggagcgcctgcacagctggattttgagccccccagggcgcgtaggcagccagctagtgggagcaagccatggtggtgggcttacttcacatccctgagtccacacaagccacgctggcttcttaagtactagcacccctctcaggcccagccctgatgtccacctccacggcccgggcttctgtctggagtctgccagccacagacatcacacacagcctctgcggcttattaaagtgtgtttacccactgtgaaaaaaa

SEQ ID NO: 84 - DNA, 2225 bp, Rattus norvegicus (Norway rat)
ctgcagtacttgtacattgctaaataaagagagggactccaggaggagcagcctgggtctaagaggtaggcagaaggaggttttaggggcctgagcacaagcttgaggagagaaaggttattaaaaagccagacgcttacaggtctcagaagggctagccagaaactgtggctggggttaaggaaagggtttaagagtgtgggcttttggttctgaggatgtagaacgtgaatgttgagagaagaaccaagtggcggagttgggtgtgagcaatgctattaggaatttgaggcagggattcacgcgctgctgtgactattttttaacaatgactcagtgctgtgacctgatactgtttccagagcgacttctaaacaaattccccctttctaggccagacacatggccccaagcccaagaccccagcatgtcctgcactggaaggaagcccactctttctacctcctgtctccactgatgggcttcctcagccgggcctggagccgcctgagggggcccgaggtctcagaggcctggttggcagaaacagtagcaggagcaaaccagatagaggctgatgctctgttgacgcctcccccggtctctgaaaatcacctacctctccgagagactgaaggaaatggaactcctgaatggagtaaagcagcccagaggctctgccttgatgtggaagcccaaagttcccctcctaaaacttggggactttcagatattgatgaacataatgggaagccaggacaagatggccttagagagcaagaagtggagcacacagctggcctgcctacactacagccccttcacctgcaaggggcagataagaaagttggggaggtggtggctagagaagagggtgtgtccgagctggcttaccccacatcacactgggagggtggtccagctgaggatgaagaggatacagaaaccgtgaagaaggctcaccaggcctctgctgcttccatagctccaggatataaacccagcacttctgtgtattgcccaggggaggcagaacatcgagccacggaggaaaaaggaacagacaataaggctgaaccctcaggctcccactccagagtctgggagtaccacactagagagaggcctaagcaggagggagaaactaagccagagcaacacagggcagggcagagtcacccttgtcagaatgcagaggctgaggaaggaggacctgagacttctgtctgttctggcagtgccttcctgaaggcctgggtgtatcgcccaggagaggacacagaggaggaagaagacagtgatttggattcagctgaggaagacacagctcatacctgtaccaccccccatacaagtgccttcctgaaggcctgggtctatcgcccaggagaggacacagaagaggaagatgacggtgattgggattcagctgaggaagacgcgtctcagagctgtaccaccccccatacaagtgccttcctgaaggcctgggtctatcgcccaggagaggacacagaagaggaagacgacagtgagaatgtggccccagttgactcagaaacagttgactcttgccagagtacccagcattgtctaccagtagagaagaccaagggatgtggagaagcagagccccctcccttccagtggccttctatttacctggacagaagccagcaccaccttgggctgcccctaagctgccccttcgactgcagaagcggctcagatctttcaaagcccccgcccggaatcagggccctgagattcctctgaagggtagaaaggtgcacttctctgagaaagttacagtccatttccttgctgtctgggcaggaccagcccaggctgctcgtcgaggcccctgggagcagtttgcacgagatcgaagccgctttgctcgacgcattgccaggcagaggagcagctgggtccttaccttacccctgctttcagggccagagcatggacacgccttagaaacctaccccttcctctgtcgtcctcgtctcttccactgcctgagccttgctcttccactgaggccacacccctcagccaagatgtgaccactccctctccccttcccagtgaaatccctcctcccagcctggacttgggaggaaggcgggctaagcctgagtagttttttgtgtattctatgagtgttagtctcttaatacgaatatgtaacgccttttgcatttgtaaaaaaaaaaaaaaaa

SEQ ID NO: 85 - DNA, 6335 bp, Rattus norvegicus (Norway rat)
catttgcagcacatttttggctttccctccccctccatacattccccccctcctttttcaatttttcttcttcccgggaagtgaattgctgatgccaaggggactttaattccattaatgatgcaactggattcgtttcaggattatgttgcacgaattgaattttgaatgaaggaggttttttttttctttttgaaagaagtgttgattctttagttcgttgtacttttaattattattttatttaaatatacaatttaattgtattattctcttaaaaatattaaatctatattttatggaaacttaccctcaaaatatatatgtttatgggtgaaattgaagacgcttccgttaagtgaggtgactggtgtattggatgtttaattgagcaccggcattgcatgacagttgttgaataacaagtggtttatttttaaaaaccacatctttaaaattttaggttcagatagtaacagtagacatcgtaagggcatttaaaagaaaaccagcagaaatcgaagcaaacatgtctggagaagtgcgtttgaggcagttggaacagtttattttagatgggccagctcagaccaatgggcagtgcttcagtgtggagacgttactggacatactcatctgtctttatgatgaatgcaataattctccattgagaagagagaagaacattcttgaatatctagaatgggctaaaccattcacttctaaagtgaagcaaatgcgcttacatagagaagacttcgaaatattaaaggtgattggtcgaggagcttttggtgaggttgctgtagttaaactgaaaaatgcagataaagtatttgccatgaaaattctgaacaagtgggaaatgctgaaaagagctgagacagcgtgctttcgtgaagagagggatgtgttggtaaatggagacagtaagtggataaccactctgcactatgcttttcaggatgacaataacttatacctggttatggattattatgttggtggggatttacttactctgctcagcaaatttgaagatcgattgccagaagagatggctcggttttacttggctgagatggtgatagccattgactcagttcaccagctccactatgttcacagagacatcaaacctgacaatatattgatggatatgaatggacatattcgtttagcagattttggttcttgtctgaagctgatggaagatggaacggtccagtcctcagtggcagttggaactccagactacatttccccggaaatccttcaggctatggaggacgggaaaggcagatatggaccagagtgtgactggtggtccttgggagtctgcatgtatgagatgctttacggagaaacaccattctatgcggaatctctggtggagacatatggaaaaattatgaatcataaagagaggtttcagtttccaacccaagtgactgatgtgtctgaaaatgctaaagatcttattcgaagactcatttgtagcagagaacatcgacttggccagaatggaatagaagactttaagaaacatccgtttttcagtggaattgattgggataacatccgaaactgtgaagcaccttacattccagaagttagtagtccaacagacacgtcaaatttcgatgtggatgacgactgtttaaaaaactctgaaacaatgcccccaccaacacatactgcattttctggccatcatctaccatttgttgggtttacatatactagtagctgtgttctttctgatcggagctgtttaagagtcacagcaggtcccacctcactggatcttgacgtcaatgtccagaggactctagataataacttagcaactgaagcttatgaaagaagaattaaacggctagaacaggaaaagcttgaacttactagaaaacttcaagagtcaacacagactgttcaagccctgcagtattcaactgttgatggtccactaacggcaagcaaagatttagaaattaaaagtctgaaagaagagattgaaaaactaagaaaacaagtagcagaagtgaatcatttggaacaacaacttgaagaagctaattctgtgagacgagaactagatgatgcttttaggcaaatcaaagcttttgaaaaacaaatcaaaactttgcagcaggaaagagaagagctaaataaggaactagtccaggctagtgagcgattaaaaaaccaatccaaagagctgaaagacgcacactgtcagaggaaactggccatgcaggagttcatggagatcaatgagcgactaacagaattgcacacccaaaagcagaaacttgctcgccatgtccgagataaggaagaagaggtggacctggtgatgcaaaaagctgagagcttaaggcaggagcttcgcagagcagaaagagccaagaaagagctggaggttcacactgaagctctaattgctgaagcctcaaaggaccggaagctccgagagcagagcagacattattctaaacagctggaaaatgaattggagggactgaagcaaaaacaaattagttactcaccaggaatatgcagcatagaacaccagcaagagataactaaactgaaaactgacttggaaaagaaaagtatcttttatgaagaagaaatctctaaaagagaaggaattcatgcaagtgagattaaaaatctgaagaaggagctgcatgactcagaaggccagcaacttgctctcaacaaagaaattatggttttaaaagacaaattggaaaaaaccagaagggaaagtcaaagtgaaagggaagaatttgaaaatgagttcaagcaacaatatgaacgggaaaaagtattattaactgaagagaataaaaagttaacgagtgaactcgataagctaacttcgttgtatgagagcttaagtttgcgcaaccagcacttagaagaagaggtcaaagatctagcagataagaaggaatcagttgcccactgggaagcccaaatcacagagataatccaatgggtgagtgatgagaaggacgcacggggctatcttcaggccttagcttctaaaatgactgaagaattagaagcgttaaggaattccagcctggggacacgagcgacagatatgccctggaaaatgcgtcgttttgcaaaactggacatgtcagctagactagagttgcaatctgccctggatgcagaaatcagagctaagcaggccatccaggaagagctgaataaagtcaaagcatccaacatcataacagaatgtaaactgaaagattcagagaagaagaacttggaactgttgtccgaaatcgagcagctgataaaggacactgaagagcttagatctgaaaagggtgtagagcaccgagactcacagcactctttcttggcatttttgaatacgcctaccgatgctctggatcaatttgaacgctctccgtcctgtactccagctggcaaaggcagacgtattgcagactctgctccgcttccagttcacacaccaactttaaggaaaaagggatgcccagcttcagctggttttccacctaagcgcaagactcatcagtttttcgtgaagtctttcactgcccctaccaagtgccatcagtgtacctccttgatggtcggtttgataagacagggctgttcctgcgaagtctgtgggttctcatgtcatataacttgtgtgaacaaagccccgaccacttgcccagttcctcctgagcaaactaaaggcccactcggtatagacccccagaagggagtagggacagcgtatgagggccatgtccggatccctaagccggcgggagtgaagaaagggtggcagagagcactggctgtggtctgtgacttcaaactgtttctttatgatatcgcggagggaaaagcatcgcagcccagctccgtcattagtcaagtgatcgacatgagagatgaagaattttccgtgagttcagtcttggcttctgatgttattcatgcaagtcgaaaagatattccctgtatatttagagtcacagcctcccagctctcagcacctagtgacaaatgttccatcctgatgctagccgacagcgagactgagaggagtaagtgggtgggagtgctgagtgaactccacaaggttctgaagaaaaacaagttcagagaccgctcagtgtatgtccccaaagaggcttacgacagcactctacccctcattaaaacaacgcaggccgcggcaatcatagatcatgagcgggtagctttgggaaatgaagaaggattatttgttgtgcatgtcactaaagatgagattattagagttggtgataataagaaaattcatcagattgaactcattccaagtgaccagcttgttgctgtgatctcaggccgaaatcgccacgtccgacttttccctatgtcagctttggatgggcgagagacggatttttataaactggcagagactaaagggtgtcaaaccatagctgctgggaaggtgcgccatggagctctgtcctgcctgtgtgtggccatgaaaagacaggtcctctgctatgaactgttccaaagcaagaccaggcacaggaagtttaaggagattcaagtcccatgtaatgtccagtggatggccatcttcagtgaacatctctgtgtgggattccagtcaggatttctcagataccccctgaatggggaaggaagtccatgcaatatgctccattcaaatgaccacacactggcattcattacacaccaaccaatggatgctatctgtgccgttgagatctccaacaaagagtatttgctgtgttttagcagcattgggatatacacggactgccagggccgaagatctagacagcaggaactgatgtggccagcaaatccttcctcctgttgttacaatgcaccatatctctccatttacagtgaaaatgcagttgatatctttgatgtaaactccatggaatggatacagacgcttcctctcaagaaggttcgacctttaaacactgaaggatcattaaatcttttagggttggagaccattagattaatatatttcaaaaataagatggcagaaggggatgaacttgtagttcctgaaacatcagataatagccgaaaacagatggttagaaacatcaacaacaaacggcgttactccttccgggtcccagaagaagagaggatgcagcagagaagggagatgctacgagatccagaaatgagaaataaattaatttctaacccaactaattttaaccacatagcacacatgggtcctggagatggaatacagatcctaaaagacctgcccatgaacccacggcctcaggaaagccggacagtattcagtggctccgtcagtattccctccatcaccaagtcccgccctgagccaggccgctccatgagtgccagcagtggcctgtctgcacggtcatcagcccagaatggcagtgcgctaaagagggaattctctggaggaagctacaacacgaagcgacagcccatgccctctccctcagaaggctctttgtcatcaggaggcgtggaccaaggaagtgacgcccccgtgagggactatgatggagaggactctgattctccaaggcattccacagcttccaacagctctaacctgagcagccccccaagccccgtttcaccccgaaagaccaagagcctctccttggagagcacagaccgtgggagctgggatccatgagcaggaccagtgactccaggcagggaccctgccctcccactctgacaacgcgcctggcagcagcatcaccttccacactgcctgccaccgaggattccttcacagccaggcccgcttcacccttcccccaacccccaggtagcttctgtagacagactgcgcagacgcagcgctaagagtagaccggttgtgttctcaccgtagccctcacgtagccctcacgtagcgcccagcagcctccatgagcgtcagctgactgttgccaggaaataaaccctcatgaattaaaacaatgcatatttttactacaataaagagtttaaataaatacatagatgtagacgttaaatactgaagtataaatagtcaaagaagcatctcttgtgttcgatgaaagatggatgcgatataagaaagatcatttaatttaaaaaaaaaaagtgttgtttcttatctgtttcccagctaagtcataatacagggtagaaaggcctcaagtgacatttataaagacacagaagtcaggtcccggtggtgtctgtcctcaagcctaggcagctgtggtcacagggaagtctaatgtctggagattactcgtgccgaattc

SEQ ID NO: 86 - DNA, 4076 bp, Rattus norvegicus (Norway rat)
gggcttgcagccagcgcctcctcttaagagaagcgtctctccaccgcatccacaggcttgtgttgtgatgtattcgcgaagtggctttcttctgaagactccagggtctgacttctgaagagaagaaggaagaggagggtggaggagcacacagaaaggcctggaggcgtcccctggtgttcaggcagcttctgggtcagaacttggagacaccatgacaaacagcgtctgtcccacagcccaaggttcaggcaaagtcatagccaggcggtgtggtcaggggccgggctggggattccccatctccccagtttcacttctgcttctaacctgtgtcaggtccttctgcccggatactgatgacgcgctagcaattctctcattcctattgggtgccgtgattccggtgaaccaatcagcgttgcccagacactagatgtaaactccacgcagccgcgggactcagccgcgtccgggacctcggataggggcgatggcaccgcgcacgctgctcctgctgctggcggccgccctggccccgacccaggttcgcgcgggtgagtgcggggtcgggagggaaacggcctctgcggggaggcgcgggagcggcacggggaagcggtccccggtcgcacccaagaccccggccccttctccaccgcgtccggagccccggcccctgctccccgcgcgccggcagccgcccgggatcctgggaggaggtcgggatctcaccgcgcgccgcccccaggctcacactcgctgcggtatttccacaccgccgtgtcccggcccggcctcggggagccccggttcattatcgtcggctacgtggacgacacggagttcgtgcgctacgacagcgacgcggagaatccgagatacgagccgcgggttgggtggatggagcgggagggtccggagtattgggagcgggagacactgatggtcaaggaaaacgagcaggtttaccgagtgagcctgaggaccctgctccgctactacaaccagagcgagggcggtgagtgaccccgggtcggaggtcaggacccctccccgtccccacacggccggagacttccgggtccgaagtccaggttcgggaacagaaccgacccggaccggtttccctttcactttggaggagtccgcgggtgggcggaacgggtgggcggggcccggcctgaccgcggggtcccgcaggctctcacaccatccagtggatgtccggctgtgacgtggggtcggacgggagcctcctccgcgggtatgatcagttcgcctacgacggccgcgattacctcgccctgaacgaagacctgaaaacgtggatggcggcggacacggcggcacagatgacccgaaacaagtgggatcaggcaggtgaagcagagagacacaaggcctacctgcagggcacgtgtgtggagtggctccgcagatacctggagctcgggaaggagacgctgctgcgctcaggtgcgggggccgcgggcttctcctcctctgccctcgggctggggctcagtcctggggaagaagaaaccctcagctgggtgatgcccctgtctcagaggggagacagtgtccctgggtctccctgatccctcatcacggtgactgcactgcctctcccacagggcccagccttctccctggagagttctgagtccctctcaggagaaggagggaatttcccccttaacagcaggggctccctgctgtcagccatggcctctcccaggcatgttctctgcccacacccactctctgaggacactgactcctgtcctgctgagtgtgtcagcccttacacctcaggaacagaagtctcctttacctcacaggactccactactctaggctggttcccacagtttctaaaagattccccgggtttctcacagatccctccctgatgtggggttggcatcccttcaataccccatttctctctcttcctacagtggagaatggtaccatgagcccttatggggtaccctggaggaatataaattgtgggatttctttttcttttttctttttttctctctttttcttatcttttacttccttttttctttccttttttttttttttttttttttggaaggcattattttacttccagtcaggttttctctgcaaacacatattaaatcaattattttctattccctcttctgttctgtgaccacccatctcatgctataaaacacccgtaaaggacggccatgttgacccactcgctcatgtggattccctcttagcttctgagtccctcaggaaagtgtgcagttctgtgctgagggaaccagctctccctgcagctcactagggagatgacagttgaagtgtcagacacacacagttcagtgtcatccttgatttaactgtgtcctgtgtagatttcagtttgtcttgttaactgtgtgatttcttaaatcttccacacagatcccccaaaggcacatgtgacccttcaccccagacctgaaggtgatgtcaccctgaggtgctgggccctgggcttctaccctgctggcatattcctgacctggctgttgaatggggaggatctgacccaggacatggagcttgtggagaccaggcctgcaggggatggaaccttccagaagtgggcatctgtggtggtgcctcttgggaaggagcagaattacacatgccttgtggagcatgaggggctgcctgatcctctcaccctgagatggggtaaggagggtgtgggtatagagctggggtcaggaaaagctggagccttttacagaccctgagctggtcaaggctgagagctggtgttcctgacccccaccttcatttcctgtacctgtccttcccagaggctcctccatccactgaccccaacatggaaaccactgtcatttatgttgtcgttggagctgtggtcatcactggagctgtgaccatgattggagctctgctgactgttgtgagggggaggaagagaaacacaggtaggaaagggcagggtcttgtttcccctcagcttcctttagaagagcgctctgatcattaatgggaagcacagccacaccccacattgctgctgtctccaactgggtcctctgtcagttctggaaacttcctcctgtcaagaccttccttgaactctcacagcttttcttctcacaggtgggaaagtaggagtctacacccctgctccaggttagtgttggggcaggagtgtccctgagggtattggagtgaagctggagatgtggggaactcggggaatccatagtagctcctccatagaaatcttctgggggcctcagttgtaccgtgatgtgaatacatacatatacacatatacatatacagaacacaatacgtgtgtgtgtgtgtgtgtgtgtgtgtgtgtgtgtgtgtgtgtgtgtatgttttcttttaccctaggcaaggacagctccgagagctctgatgtgtctctcccagattgtaaaggtaactctgggtctgactggggaggggcaatgtggacatgattgcgtttcagggactcccagaatcccctgtgagtggagggttgttgggctgttgtcttcacagtgatggtttgtgactctcgttctctagcatgaagacagctgcctggagtggactgagtgacagacgatgtgttcaggtctctcctgtgacatccagagtcctcaggtctctttagacaccagtgtctgatgttccctgtgattctatggcttcagtgtgaagaactgtggagcccaggctgccctgcacacctggaccctgtccctgcactgcctgcattcccttccacattcaaccttgctggtccagcctggggttgggggggtggggacatatgcatcctgtcactcagtgctgctttgagctgcaactcctcacttctacactgagaataagaatctgagtgtgaacttgactgttcacatccttgacacaagtgttgattgctttttaaattactggattgaatacttagaggttctttgttttttatttttgttttgttttgttttctttgttttgttttaaaataaatggcaggtgga

SEQ ID NO: 87 - DNA, 4969 bp, Rattus norvegicus (Norway rat)
aagcttacacagaccctacaacaagacttggtgaaaccgtgtgcccaagagcacaagtgcggttccgtgcggtttagtgcggtttacacgacaggaggtcgtgtaaacagctcctgctgctttctctttcataaagacacaagtgatacagtctcgcctctcgttcctgttggacgcaggcgtctgtagaagccaatcagcagcacagaagttccaaagtacgagtcaacagaaacacaacccacattcatgtttttcacagtccctgggcgtgaggatgttacctcctgcctatttgctccaactactggcaggcaccatggtcctgacccagactagtaagtgcggggaggggtcgggaaagaaaagactctgagaggtgaaagggggtggggtgtggggccaggggtggtggcgggggggggcagcaccctagggtctgtcaccctatcccagtccctcctctgccagcacctgagatcctgagcctagaggagctcagggtctcactgcgcgccgcccccaggctcacactcgctgcggtatttctacaccgccctgtcccggcccggcctcggggagcccaggttcattgtcgttggctacgtggacgacacgcagttcgtgcgctatgacagcgatgtggagaatccgaggatggagccacgggcgcggtggatggagcaggaggagccggcatattgggagcgggagactcggaaagccagggacaccgggaggaacttcaaagtgaatctgaggaccctgctccgctactacaatcagagtgacgacggttgagttgactgccggagggatcacaaacaggatccctccatgttccctgagactggcctgggtcatcttgaacccggccgggtcaaagtatcatccaaacgcctacctagaaatcccagacaagaaagccccggcagagttctgcttaggtttcggttgcacttttgtttctaaaaattctggcatatctactgacagcgggcaagatggccacgagggggcgctgaaccggcgtttcccctttcagaatctcacacgctgcagtggatgtacggctgcgacgtggggcccgatgggcacctgctccgcggttattgtcaggaggcttatgacggccgggattatatctccttgaacgaggacctgcgctcctggaccgcgactgacatggcctcacaggcctctaagatcaagtcagaggaagttggtgaggcccatcaccagagggcctacctgcaaggtccttgcgtggagtggctccacacatacctacatctgggaaaggagacgctgctgcgctcaggtgccctggagacccctccttagttttcctctgggggtttgggggggaaaggcttggggtatagctcaggggcagaacgctgtccagcagccacagtgctgaagagaagggagaaagactcccaaggctgcttttcctctgtcaggaagactaagccttaatcaagcagatcagcttgacaatgtccctggacccattaggggcattttcctcaggcctccctctatgccctactcagtgtctctgagagtcagactccagcgttgttctcagtctctaggccctcacccaggctcaggacgagaaggcccatgcccaggagtcctggccagagaccctggagtctcctgccccatagttgtcagactcacatcctaaagcagacaaaggaacagcgccgggaggtgcatgtgctcctgctggtgtctggattgtggacaccctaatcccatcccaggtctcctgaccatcccaggatggtcacatggacaatactgtgtccctggaagaaagctagatgcctcagtcttacaagtctctccctcagaccccccaaaggcacatgtgacccttcaccccagacctgaaggtgatgtcaccctgaggtgctgggccctgggcttctaccctgctgacatcaccttgacctggcaattgaatggggaggacctgacccaggacatggagcttgtggagaccaggcctgcaggggatggaaccttccagaagtgggcagctgtggtagtgccttctggggaggagctaaagtacacatgccatgtggagcatgagggactgcctgaacctctcgccctgagatggggtaaggagggtgtgggtgcagatctggggtcagggaatgtggagccttctgcagaccctgagctggtcagggatgagaatcatgactcttccttcccagagccttctccattcaccgactccagcatgccagtgattgttgtccttggagctgtggccatcattggagctgtggccatcattggagctgtggccatcattggagctgttgtgaggaggaggaagagaaacacaggtaggaaagggcagggtctgactcttctctcagcctctttgaagtgtgctgtgctcattaaggggaaacacagccacaccctgcattgcctagtctctaacctggactgctgtcagtgctggaaacttcctagggctggtgtttccctgacttctcatgactttccttctcgacaggtgaaaaaggcagctatgctcatgttctaggtaggtgtgggtggggttggccgtggagtggggtgcacccttgtacccagaggcccttgggatgggagctggcgcttatggaggagttctgccaggcccataattccctcttgccatattggtcacctgaatatacctgcatttataattcctctactcaggcagcaaggctttccagatctctgactggcctcagaaggcatgaaaaggtatgaaaacccatgggggcctgggatcggacctgaggcaaagggaagaacagggccttgtgggatgatgtcacaggtgaggcaggtacaagatagaaggaggcctgttattggatgagaaagaaggatgggtgggagacaagtttgaaggaagaagaggatactggaacagagagagaggaggagaggagggagagggagagaagccttggcaggcaatatatcaggtgacgttaagattctcctctgtgtacttagaggttgttattaatgttcctaagggatggatggtaccgggctttgtatgtttaactcggcaattatatcttatcaattggctctaagattattgttggtgtgttcttttatgtgatggtttgagtgtaggaaagtgtgcagtgacaggagacgatgggccagcacagagttgggatgtgtttccacccaagatatctaacagatatcttggggcactgcagtgcagacctagcggggtaaaagacaactatactttttttactttttatatttttacaacaacagggtctctcagatttagacatttgaatgactgagcatctttacaatgacttcaggactcttgttctattgcgttcagacagttgcctcgtggggctgagcgacaagttctgactaaacatctgagggagctgcttcccctgaggacaatgtgaagaactggcaatcccagaccttcttgcctccctggacacctgacttcacaacagaaaataatctgactctgggctgggtgtttcctattgcttttatctgcactgagtggaaatgcgatttccaacagtgtaacgcagcaccgttgtgtggtggtagtgacattgcacacaggtttgtgagctgggggtgtgatgtgcttttcttactgtaggcagaacaagctagaagtccaccattcctcttatggtcattgttttaaaacaaaacaaatgctggagagatggctcagtgttaagagcactgacttctcttacagaggtcctggttcaaatcccagcaaccacatggtggctcacaaccatatgtaatgagatctgatgctctcttctgatgtgtctgaacacagctatatatgataaataaatctaaaaaatattttttaaatggccagacagatggcatgagtagggcacaccatggtcaactctgctgtctgtgtatctctagacatccagtgctctttagagtccacacaaggtcattaaaaggactggggtggatggtgactggagagatagctcagtggttaagagtgtttgctgcttcatgggtggtggtggtggcacaagcctttaatccaaacactcaggaggcagaggcaggtggatctctgagttcaaggccagcctggcctataaggcaagttccaagatagccaaggatacacagagaaaccctgtttgaaaaaacccaagcctagacctggagagttggctcaatggttaagagcactgactgcttttccagaggtcctgagttcaaggcccagcaaaggcacatggtggctcacaaccatctgtaatgggatctgatgcacttttctggtgtgtctaaagcgacatggtaactcgctgtctgtaactagtaggcaaacagttcatatctcacacagacatgaatgcagatagagcaccaacacatataaaattaaatctttaaaaaatgaaaggtctgggggctggatgaatggtgtttgtctttgaaatgtctgacagtgctgtgactcacagcctgcatagcagctcctattgcctggtgttcaccatctgtcttggttataaaaaggtttcgtaatgtgaaacccttcaaatgagctggtgcccttctcaccagtttgcatcttgacaggattcctgaagggcttatattctgggccttcccattgtggaggattaggttttacacaacgtatcctctctagcattgcaatttccctgagccttaaaatcccttcatcgacgctgagccaagggatatctggcatctgcaactccttttccgtaggccgtcatttgatgaacgcttcagccaaccattcaaacaaactttctgacacttttttttaactgtgtggccttccatattaaacccagaatctccactcaaagggcccatgtcaataaactcagcctgatctatt

SEQ ID NO: 88 - DNA, 2847 bp, Rattus norvegicus (Norway rat)
cagctccaaggcacttgctccatttggggtgtgcctgcacctagctggttgcaaattgggccacagaggatctggaaaggatggaacaacgggctagcttagactcagaggagtctgagtccccaccccaagagaactcctgcctggaccctccagacagagaccctaactgcaagccacctccagtcaagccccacatcttcactaccaggagtcgtacccggctttttgggaagggtgactcggaggaggcctctcccctggactgcccttatgaggaaggcgggctggcttcctgccctatcatcactgtcagctctgttctaactatccagaggcctggggatggacctgccagtgtcaggccgtcatcccaggactccgtctccgctggtgagaagcccccgaggctctatgatcgcaggagcatcttcgatgctgtggctcagagtaactgccaggagctggagagcctgctgcccttcctgcagaggagcaagaagcgcctgactgacagcgagttcaaagacccagagacaggaaagacctgtctgctaaaagccatgctcaatctgcacaatgggcagaatgacaccatcgctctgctcctggacgttgcccggaagacagacagcctgaagcagtttgtcaatgccagctacacagacagctactacaagggccagacagcactgcacattgccattgaacggcggaacatgacgctggtgaccctcttggtggagaatggagcagatgtccaggctgcggctaacggggacttcttcaagaaaaccaaagggaggcctggcttctactttggtgagctgcccctgtccctggctgcgtgcaccaaccagctggccattgtgaagttcctgctgcagaactcctggcagcctgcagacatcagcgcccgggactcagtgggcaacacggtgcttcatgccctggtggaggtggcagataacacagttgacaacaccaagttcgtgacaagcatgtacaacgagatcttgatcctgggggccaaactccaccccacgctgaagctggaagagatcaccaacaggaaggggctcacgccactggctctggctgctagcagtgggaagatcggggtcttggcctacattctccagagggagatccatgaacccgagtgccgacacctatccaggaagttcaccgaatgggcctatgggccagtgcactcctccctttatgacctgtcctgcattgacacctgtgaaaagaactcggttctggaggtgatcgcttacagcagcagtgagacccctaaccgtcatgacatgcttctcgtggaacccttgaaccgactcctacaggacaagtgggacagatttgtcaagcgcatcttctacttcaacttcttcgtctactgcttgtatatgatcatcttcaccgcggctgcctactatcggcctgtggaaggcttgcccccctataagctgaaaaacaccgttggggactatttccgagtcaccggagagatcttgtctgtgtcaggaggagtctacttcttcttccgagggattcaatatttcctgcagaggcgaccatccctcaagagtttgtttgtggacagctacagtgagatacttttctttgtacagtcgctgttcatgctggtgtctgtggtactgtacttcagccaacgcaaggagtatgtggcttccatggtgttctccctggccatgggctggaccaacatgctctactatacccgaggattccagcagatgggcatctatgctgtcatgattgagaagatgatcctcagagacctgtgccggtttatgttcgtctacctcgtgttcttgtttggattttccacagctgtggtgacactgattgaggatgggaagaataactctctgcctatggagtccacaccacacaagtgccgggggtctgcctgcaagccaggtaactcttacaacagcctgtattccacatgtctggagctgttcaagttcaccatcggcatgggcgacctggagttcactgagaactacgacttcaaggctgtcttcatcatcctgttactggcctatgtgattctcacctacatccttctgctcaacatgctcattgctctcatgggtgagaccgtcaacaagattgcacaagagagcaagaacatctggaagctgcagagagccatcaccatcctggatacagagaagagcttcctgaagtgcatgaggaaggccttccgctctggcaagctgctgcaggtggggttcactcctgacggcaaggatgactaccggtggtgtttcagggtggacgaggtaaactggactacctggaacaccaatgtgggtatcatcaacgaggacccaggcaactgtgagggcgtcaagcgcaccctgagcttctccctgaggtcaggccgagtttcagggagaaactggaagaactttgccctggttccccttctgagggatgcaagcactcgagatagacatgccacccagcaggaagaagttcaactgaagcattatacgggatcccttaagccagaggatgctgaggttttcaaggattccatggtcccaggggagaaataatggacactatgcagggatcaatgcggggtctttgggtggtctgcttagggaaccagcagggttgacgttatctgggtccactctgtgcctgcctaggcacattcctaggacttcggcgggcctgctgtgggaactgggaggtgtgtgggaattgagatgtgtatccaaccatgatctccaaacatttggctttcaactctttatggactttattaaacagagtgaatggcaaatctctacttggacacat

SEQ ID NO: 89 - DNA, 453 bp, Rattus norvegicus (Norway rat)
ttcttccctcactttgacttaaatgagactttagaaaaggaagatgaatgtgtctcattatttgccatgtttaatcagaatcgctgattcttcagttcttgaatttttgtaaggcgtctttagaatgggatgatggtattgagtaattgggtggagtttggtcggtgacaaaaatactttctagaaatttgtttgtaactaatagcggaaaactcaaaaataatgtaattggggagctggagtgatggctcagtggctaagagtagttgttgatctttcagaagacctgggtttgattcccagcaacgccctcttctggcctccttgggcaccagacacatacatggttcacaggcatacttgaagccaaaacactactacacataaactaaaataaaaaatacttggggggggggcaggcaaaacaaaacaaaacaacaacaaaaaaaaaaa

SEQ ID NO: 90 - DNA, 816 bp, Rattus norvegicus (Norway rat)
gttgtgctagattaaagtttcagagctcagtagattgagattgtaatgtctgtcatgtatgcatgcatttctgtaacagacatgcatcaacttttacataagtacgcttgtgtgactcgttgagaaaacacaggaaagaaagattgtaagtccaaatcatgtcttccactttgctcttctatatttcttgaccacttagaaaaaaagctcacaagcctttgaagaaacagcagcaggctgttatttttttcaaggtttacaaattaagtgcttgatttttaatgtattctcgctactgttttgattttcagatcttgattcaatatttgaagatgtgccttttattgggtaatgttaattctcgaatgtagtaatgttgtaccacaattgtaatgttacatgatcatgggtgtggcattctctgacaaattatgtgacaagaaagtcattttcagagaactcatggctccgattgcacagtccccttgctaaagcaaagggcactctcttaaggctacttcagaactggtctttgtattttctctaagtgatggatgcgtcgtgtccatttagaggcagggtaccacgtgtcccaggcagccctagatatgtgccatgagaaagttcaaagactaacaaagtctacaggaactcaaaatttcatttttgtaatggtaaccccccaagattttctccaagaaataaattattttgtactttataacttaaaagcagctagtagtacatttctgagatatagcaggagaccaaaacatttttggaaaaagaataaatatataaagagaaaaaaaaaaa

SEQ ID NO: 91 - DNA, 217 bp, Rattus norvegicus (rat)
tggatgcgtcgtgtccatttagaggcagggtaccacgtgtcccaggcagccctagatatgtgccatgagaaagttcaaagactaacaaagtctacaggaactcaaaatttcatttttgtaatggtaaccccccaagattttctccaagaaataaattattttgtactttataacttaaaagcagctagtagtacatttctgagatatagcaggagac

SEQ ID NO: 92 - DNA, 1039 bp, Rattus norvegicus (Norway rat)
gaaacgcctcctcgttttgctcagcatggcacatttgagtatgaatattctcaacgatggaagtctttggatgaaatggaaaaacagcaaagggaacaagttgaaaaaaacatgaaggatgcaaaagacaagttggaaagtgaaatggaagatgcctaccatgaacaccaagcaaatcttttgcgccaagatctgatgagacgccaggaagaattaaggcgcatggaggaacttcacagtcaagaaatgcagaaacgtaaagaaatgcagttgaggcaagaggaggaacggcgtacaagagaggaagagatgatgattcgccaacgtgagatggaagaacaaatgagacgccaacgagaagaaagctacagcaggatgggctacatggatcccaagagaaagagacatgagaatgggtggtggtggaacaatgaacatgggagatccctatggttcaggaggccagaaatttccaccgctaggtggtggtggtggcataggttatgaagctaatcctggagttccaccagcaaccatgagtggttccatgatgggaagcgacatgcgtactgagcgctttgggcagggaggtgcgggtcctgtgggtggacagggtcctagaggaatggggcctggaacgccagcaggatatggtagagggagagaagagtatgaagggccaaataaaaaaccccgattttagatacttaggctttcattccagtttggttttgtcttcttgtttagataccacttaaattcttggcattttagtaagaaagctacctttttatggatgttagcagtttattgacctgatatttgtaaatggcctgtttgggcaggtaaaattatgtaacgcagtgttcaaaacaggagaaaaattttttcatttactttttttttaactgtataatgtttctcaagttaatggcagtgtaccttgtgccactgaatttccaaagtgtaccattttttttttactgtgcttcaaataaatagaaaaaaatagttatgaacaaaaaaaaaaaaaaaaaaa

SEQ ID NO: 93 - DNA, 1053 bp, Rattus norvegicus (Norway rat)
ggagctgtccagcgctgagagacaggaaaggccatggctaaggagtggggttacgccagccacaatggtcctgagcactggcatgaactttatccaattgccaaaggggacaaccagtcacccattgaactgcatactaaagacatcaggcatgatccttctctgcagccttggtcagtatcttatgatcctggctctgctaagaccatcctgaacaatgggaagacctgcagagttgtgtttgatgataccttcgacaggtccatgctgagaggtggccctctctctggaccctaccgacttcgccaattccatcttcactggggctcctcggatgaccatggctctgagcacacagtggatggagtgaagtatgctgctgagcttcacctggttcactggaacccgaagtataacaccttcggagaggctctgaagcagcccgatgggattgctgtggttggcatttttctgaagataggacgggagaaaggcgagttccaaattctccttgatgccctggacaaaattaagactaagggcaaggaggctccttttaatcacttcgacccatcgtgcctgttccctgcttgccgggactattggacctaccatggctccttcaccacgccaccctgcgaggagtgcattgtgtggctgctactgaaagagcccatgacagtgagctcagaccagatggccaagctgcgcagcctgttcgccagtgcagagaatgagcccccggtgcctctggtggggaattggcgccctcctcagccgatcaagggcagggtggtgagggcctccttcaagtaaggctctggacgtgccctcttcaggaaaggaattctgtccctgaagagccagcttgcctcctcctggtgctccctgctccaagctatcctacaacactgagagaaagaagagacgcagtcagatgaaaccgcagtgccttttgacatgatctaacccagaagcatgaatttcacacctaacctttttaataactaccttttctaaaaaaattagtatttctagtataaattcagtgaa

SEQ ID NO: 94 - DNA, 1305 bp, Rattus norvegicus (Norway rat)
ggagaggagagaagagagagagattcatttgccttccttggattgctgagggaagagaagttggtcaggagggaaaggggaggaatctgagctatgttcaaagaagcctgacatctgtcgaggatcccagccccaaggtggagccagtgtgcttatgatgacctgctgggaactggcttcattctgctctgcctgcccgtcctggagcctggtgaatccttccctgagtctaacctccgtcctcatgagactgttctctccatttctgcttgcaggaagattagtgtcaccgcctttccccctgcctctgggtgccaagcctgcagcctgcccgtcagccccagctccagctgatcccccaccatccaggtcgcctgcagcctgtaactacccactgtgttggttacagcagtcatctatcccgtgcgccctgaagccagctctgtacagtttcgtttctgatctctccagagcccaagcagagtagacccctgtccagcctagtgaccttcgcctgagcgctggttaatatttgaccaaaggcggtggggctcctccccctgggaagatataagctggtctggggctactctgctttcttcttggcctgagctgttccgagctccctgcccaccagcatcatggccaagggtttctacatttccaagaccctgggcatcttgggcatcctgttaggtgtggcagccgtatgcaccatcatagctctgtcggtggtctacgctcaggagaagaacaggaatgcggagaactctgccatagcccccacgctcccaggcagcacctcagccaccacctcaactaccaaccctgctatagatgaaagcaaaccttggaaccagtatcgcttgcctaagactcttatacccgactcctaccaggtgaccttgaggccttacctcacccccaacgagcagggcctgtacatcttcaaaggttccagtactgtccgctttacctgcaacgagaccacaaatgtcatcattatccacagcaagaagctcaactacaccaacaaagggaaccacagggtggcgttgcgagccctgggtgacactccggcacctaacatcgacacaacggaactggtagagcgcacggagtacctggtggtgcacctgcagggctccctggtaaagggccatcagtacgagatggacagtgagttccagggggagctggctgatgatctggctggcttctaccgcagcgagtacatggaaggtggcaacaagaagtaggttgcacggggctgcagctggggttatggggagggaggggctggaa

SEQ ID NO: 95 - DNA, 546 bp, Rattus norvegicus (Norway rat)
  misc_feature (27)..(27): n
ggaattccgctaatagctagactggtnccagtcagacggaggaaacctggccagcttttgcactttctaggtgacgatggacatacagaggacccaatccttgcttctgctcttgttgctgaccctgctggggttagggcttgtacagccctcctatggccaagatagaatgtaccaacggttccttagacagcatgtggaccctgagggtacaggcggcagcgacaactactgcaacgtgatgatgcagagacggaggatgacttctacccagtgcaaacgcttcaacaccttcatccacgaagacatctggaacattcgcagcatctgtgatactgccaatatcccatgcaagaatggcaatatgaactgtcacgaaggcatagtgagggtcactgactgcagagagacagggagctctgtgccccacaactgtaggtacagggcgagagccagcactaggcgagttgtcattgcctgtgagggtaccccagaggtcccagtgcactttgacagatagatgacatctgtagctgctactgctgg

SEQ ID NO: 96 - DNA, 1076 bp, Rattus norvegicus (Norway rat)
cacacagcaaacatgacccagcagccgcctgacgttgaggaggatgactgtctttctgaataccaccacctcttctgtccggaccttctccaggacaaagtggcttttatcactggtggtggttctgggattggcttccggatcgccgagattttcatgaggcatggctgccacactgtcatcgtcagcaggagtctgccgagagtgtccgaggctgctaagaagttggttgctgccactggaaagcggtgtctccctctgtctatggatgtccgagttcccccagctgtcatggctgctgtggaccaagcgctgaaagaatttggcaaaatcgacatcctcattaactgtgctgcagggaactttttatgccctgccagtgcattgtctttcaatgcctttaagactgtggtggacattgacacccttggcaccttcaatgtgtctcgtgtgctttatgagaagttcttccgggaccatggaggagtgatcgtgaacattaccgccaccctcagtatgcgggggcaggtgctgcagctccatgcaggcgctgccaaggcggctgtggatgctatgacgcgacacttggctgtggagtggggtccccagaatatccgtgtcaacagcctggctcctggtgccatcagcggcactgagggtctgcggagattaggaggccccaaggccagttcgaaatttaagtatctttcaagtcctattccaagactcggaaccaagacagaaatcgcccacagcgtgctgtacctagccagccctctggcttcctatgtctcagggattgtgttggtggttgatggtggtagctggatgacgctcccaaatgacattgggcgactgctagagtttgaatcctcctctgctaagctgtagtgtttgaagagcacacccaaggcttcaagcatgttaaagcaacagaatcaactgaactacgtcctctaccccaagataccttttttgacacataaacattgattgccttaagaaagttgtactgaggaggccgtgttcttccatggggaggcttccctgtctcacatagtctatagtcacacgaa

SEQ ID NO: 97 - DNA, 1272 bp, Rattus norvegicus (Norway rat)
gaattcgactgctggaaccaacgtcctctcttaccctccaccttcttctgccacctctaccacggtcaccatgtcgcaagcccggcctgccactgtgctgggtgccatggagatgggtcgccgcatggatgtgacctccagctccgcgtcggtgcgcgccttcctgcagcgcggccacacggagatagacaccgccttcgtgtatgcgaacggtcagtctgagaccatcctaggagacctggggctcggactgggccgcagcggctgcaaagtaaaaattgccaccaaggctgccccaatgtttgggaagacactgaagccagccgatgttcggttccagctggagacgtcactgaagaggctgcagtgtccccgggtggacctcttctatttacactttccagaccacggcactcctatagaggagaccctgcaggcctgccaccagctgcatcaggagggcaagtttgtggagcttggtctgtccaactatgtctcctgggaagtggctgagatttgtaccctctgcaagaaaaatggctggatcatgccaactgtgtaccagggcatgtacaacgccatcaccaggcaggtggagactgagctcttcccctgcctcagacacttcggactaaggttctacgccttcaaccctttggctgggggcctgctgactggcagatataaataccaggataaggatgggaagaatcctgagagccgcttctttgggaatccattttctcaactgtacatggaccgctactggaaggaggaacacttcaatggcatcgccttggtggagaaggctctgaagactacctatggccccactgcccccagtatgatctcagctgccgtacggtggatgtaccatcactcacagctcaagggcacccaaggggatgcagtcattctgggcatgtccagtctggaacaactggagcagaacttggccttggtcgaggaagggcctctggagccagctgttgtggatgcctttgaccaagcctggaacctagttgcccacgagtgtcccaactatttccgctaagatacatctgccttggggatggcgcagcttactgcctgccccgccttgtcctgggctcgatctgatctggttctttcctttttagacaggtcactgtctttttcttccctgctttctatacagccagttgctttcaaagtgagagctggctgagccccaatacctcctgctgaataaaactgttccctgtcacagcctgggctacaactggcggccga

SEQ ID NO: 98 - DNA, 459 bp, Rattus norvegicus (Norway rat)
ttcattcccagcatgatttccaaccttcctaacagaccacgttctttcccagaaaggatagggttttaggcatagatgagtacacagcacacatgtgagttacataagcaggctgaactctagcctttctgttcgtttgatttcattcttctaaaagtgctgcttacagcaggaataggttacctcatggcttcaagaactcaacatcagaccacagagtagcttcacagggacccaaaggagcagaacttgtagtgagaaaaaaccaaaacaacaacaacaaaatccctaagaactgggtatctgccatccaacacacatggttttaaaacaatttttaaatttaaacgtatttttatatttctttctttccccatccctacccacccatctttaagttctttctcaaaaaacaaataatctaatacaacaaaaccccccaaaaaccaaaaaaaaaaa

SEQ ID NO: 99 - DNA, 1416 bp, Rattus norvegicus (Norway rat)
atgtggaaagcctctgcaggccatgctgtgtccatcacccaggatgatggggaagccgatgactgggagactgaccctgattttgtgaacgatgtgagtgaaaaggaacagagatggggcgccaaaaccgtgcagggatcggggcaccaggaacacatcaacatacacaagcttcgagagaatgtcttccaagaacaccagacactcaaggagaatgagctggaaacgggacccaaggcttcccatggctatggcgggaagtttggtgtggagcaagataggatggacaaatcagctgtgggccatgagtaccagtcaaagctctccaagcactgctcacaagtggactcagtccggggcttcggaggcaagttcggtgtccagatggacagggtggatcagtctgctgtaggctttgaataccaggggaagacggagaagcacgcctcccagaaagactactccagtggtttcggtggcaaatatggagtgcaagctgaccgtgtagacaagagtgctgtggggtttgactaccagggcaagacggagaagcacgagtcacagaaagattactccaaaggttttggtggcaaatacggaattgacaaggacaaggtggataaaagcgctgtgggctttgagtatcaaggcaaaacagagaagcatgagtcccagaaagactatgtaaaaggctttggaggaaagtttggtgtgcagaaggatcggatggacaagaacgcatccacctttgaagaagtggtccaggtgccgtctgcctatcagaagactgtccccattgaggctgtgaccagcaaaaccagtaatattcgtgctaactttgaaagcctggcaaaggagagagagcaggaggacagacggaaggcagaagccgagagagctcagcggatggcccaagaaaggcaggagcaggaggctcgaaggaagctggaagagcaagccagagccaagaagcagacaccccctgcatcccctagtcctcagccagctgaagacagaccaccatccagccccatctatgaggatacagctccgttgaaggccgagcccagctacggaagtagtgagcctgagcctgagtacagcactgaggctgcaggccttcctgaggccagcaaccagcaaggtctggcctacacatcagagcctgtttacgagaccacagaggttcctggccactaccaagcagaggatgacacctacgatgggtatgagagtgacctgggcatcacagccatcgccctgtatgactaccaggctgctggcgatgatgaaatctcctttgaccctgatgatgtcatcaccaacatagaaatgattgacgatggctggtggcgtggggtgtgcaaaggcagatatgggctcttcccggccaactatgtggagctgcggcagtag

SEQ ID NO: 100 - DNA, 816 bp, Rattus norvegicus (Norway rat)
cggcacgagcttgagtttccgatgagacacaagactgaagaggaaaactgatctcccccaaagacatagaataattggtaaatctggacgagaacacaggctcataactgcgaagagcaaggatttttatattactcttataggaaagagaccgaaagatctttacaagctatcttgctaggagatgcccaaagtcaaaagaagccggaaagcacctccagatggctgggagctgatcgagccaacgttggatgaactagatcaaaagatgagagaagctgaaactgaaccccatgaggggaagaggaaggtggagtctctgtggcccatcttcaggatccatcaccagaaaacccgctacatcttcgacctcttttacaagaggaaagccataagcagagaactctatgaatactgcattaaagaaggctatgcagacaaaaacctgattgcgaagtggaagaagcagggctatgagaatctatgctgtctacgctgcatccagactcgagacaccaacttcggcaccaactgcatttgccgggttcccaagagcaagctggaagtgggtcgcatcatcgattgcacgcactgtggctgccggggttggtctggttgactgacgcccctgactcctctgcatcttggactttggaccttgggctcctgcttattgggccactgcctcctgaagcaactcttctcagattggcactcagagaaaagacccaggggaagcatgagctctacaggtgacagctttagtgttcaccagctgagatctgtaaaaataaaacctttagacctcttaaaaaa

SEQ ID NO: 101 - DNA, 3559 bp, Rattus norvegicus (Norway rat)
  misc_feature (11)..(11): n
  misc_feature (16)..(16): n
  misc_feature (3298)..(3298): n
  misc_feature (3362)..(3362): n
  misc_feature (3412)..(3412): n
  misc_feature (3480)..(3480): n
ccatctaagcntaaanactgcaaagcactcacatcgctcagcaatgccgggcccgctagggctgctctgcttcctcgccctggggctgctcggctcggccgggcccagcggcgcggcgccgcctctctgcgcggcgccctgcagctgcgacggcgaccgtcgggtggactgctccggaaaggggttgacggccgtaccggagggtctcagcgccttcacccaagcactggatatcagtatgaacaatatcacccagttaccagaagatgcatttaagagtttcccatttctagaggagctacaactggctggtaacgacctttctcttatccatccaaaagccttgtctgggctgaaagaactcaaagtcctaacactccagaataatcagttgagaacagtgcccagtgaagccattcacggactgagtgctttgcagtctttacgcttagatgccaaccatattacctcagtcccggaggacagttttgaagggcttgtccagttacgccatctgtggctggatgacaacagcttgacggaagtgcccgtgcgtcccctcagcaacctgccaaccctgcaggcgctgaccttggctctcaacaacatctcaagcatccctgacttcgctttcaccaacctttcaagcttggtggttctgcatctgcataacaataaaattaaaagcctcagtcaacactgttttgatggactagataacctggaaaccttggacttgaattacaattacttggatgagtttcctcaggctattaaagcccttcccagccttaaagagctgggatttcacagtaattctatttctgttattcctgatggagcatttggtggtaatccactgctaagaactattcatttgtatgataatcctctgtcttttgtggggaactcagcatttcacaacctgtctgatctgcattgcttagtcattcgtggtgcaagcctggtgcagtggttccccaatctgaccggaactgtccatttggagagtctaaccttgacagggacaaaaataagcagcatacctgatgatctgtgccaaaaccaaaagatgctgaggactctggacttatcttataacaatataagagaccttccaagttttaatggttgtcgtgcattggaagaaatttcattgcagcgtaatcaaatctccctaataaaggaaaatacttttcaaggcctaacatctctaaggattctagatctgagtagaaacctgatccgtgaaattcacagtggagcttttgcgaagcttgggacaattactaacctggatgtaagtttcaatgaattaacttcatttcctacggaaggcctaaatgggctcaatcaactaaagcttgtgggtaacttcaagctgaaagacgccttggcagccagagactttgctaatctcaggtctctatcagtaccatatgcttatcagtgttgtgcattttgggggtgtgactcttatgcaaatttaaacacagaagataacagcccccaagaacacagtgtgacaaaagagaaaggtgctacagatgcagcaaatgtcaccagcactgctgagaacgaagaacatagccaaataattatccactgtacaccttcaacaggtgctttcaagccctgtgaatatttactgggaagctggatgattcgccttacagtgtggttcattttcctggtcgccttgcttttcaacctgcttgtcattttaacagtgtttgcgtcttgttcatcactgcctgcctccaaactcttcataggcttgatttctgtgtctaacttactcatgggcatctatactggcatccttacttttcttgatgctgtgtcctggggccgatttgccgaatttggcatttggtgggaaactggcagcggctgcaaggtagccgggtctctggcagtcttctcctcagagagcgctgtattcctattaacactggcagctgtggaaagaagcgtatttgcaaaggatttgatgaaacacgggaagagcagtcacctcagacagttccaggtggccgccctcttagctttgctgggtgccgcagtggcaggctgcttcccccttttccacggagggcaatattctgcatcgcccttgtgtttgccgtttcctacaggagaaaccccatcgttaggattcactgtgaccttagtgctattaaactcactggcatttttactaatggccattatctacactaaactatactgcaacttagagaaggaggacctgtcggaaaactcccagtctagcgtgattaagcacgttgcctggctcatcttcacaaactgcatcttcttctgccctgttgcatttttctcatttgcaccattgatcacggcaatctccatcagccccgagataatgaagtctgttacactgatattcttcccgttgcctgcttgcctgaatccggtcctgtatgttttcttcaacccaaagtttaaagaagactggaagctactgaagcggcgtgttaccaggaaacacggatctgtttcagtttccatcagcagccaaggcggttgtggggaacaggatttctactatgactgtggcatgtattcccacttgcagggtaacctgactgtctgtgactgctgtgagtcatttcttttgacaaaaccagtatcatgcaaacacttaataaaatcgcacagttgtcctgtattgacagcggcctcttgccagaggccagaggcctactggtctgattgtggtacacagtcagcccattctgactatgcagatgaagaagattcctttgtctcagacagctctgaccaggtgcaggcctgtggacgagcctgcttctaccagagtcgtggattccctctggtgcgctatgcttacaatctacagagagtcagagactgaactccagtgtctgcctgcgactgtttttccccatcaaccaaatcacagtgctggcatgggagctatctgtctttagacctttcatctggaaagcacttgtagaatcacttcctggtgtcatgcagaagaggaggaaggtggcagtttatttctcagatcagacatctgtgaagaatgggtgcctaaactataaattgttgaaaaaaaattgtgatgccccagtaatgtgtgctctattctaaataaatgcaacttgaaaatggtttgatgtatggcatagcaatataaaattagggttttattttttttctttctgatccatcaggtgcaaagttcaaactatttctgaattaagcacaaaataaaggacagctgttaatatattttaaatgaaaatgngaaattgtaaaactaagaaaatgccttgctaatttcacctaatgattcatcattaatctcaggntgactgacttcagggccacaaaagagactgtctcccagctagagttatgnagagttcaaacaggcatccccttcatgtgttttctgtgtccataaattaaaggttctgttcaaatganttgtaaatctaaaacctgaagatgttttaaggactattgacagctgttagattttgggtaccgagctcgaattcgtaat

SEQ ID NO: 102 - DNA, 1607 bp, Rattus norvegicus (Norway rat)
  misc_feature (1094)..(1094): n
catgctgaaatatcgcggtttaccatatggggatggtggcgacaatctcctggagcccgtcagatcgcggaaattaccgatgcctgcgcagctccttccgctcagctccgcgtccgagcctcctggaacgatatttggagttcttaaaagatggcagacattgacaacaaagaacagtctgaacttgatcaagatttggaagatgttgaagaagtagaagaagaagaaacgggtgaagaaacaaaaatcaaagcacgtcagctaactgttcagatgatgcaaaatcctcagattcttgcagctcttcaggaaagacttgatggtctggtagacacaccaacaggatacattgaaagcttgcctaaggtagtcaaaagacgggtgaatgctctcaagaatcttcaagttaaatgtgcacagatagaagccaaattctatgaggaagttcatgaccttgagagaaagtatgctgttctctatcagcctctgtttgataagcgatttgagatcattaatgcaatttatgaacctacagaagaagaatgtgaatggaaaccagatgaggaagatgaagtttcggaggagctgaaagaaaaggccaagattgaagatgagaaaaaggatgaagaaaaagaagaccctaaaggaattcctgagttttggttgacagtttttaagaatgatttgctcagtgatatggttcaggaacatgacgaacctattctgaagcacttgaaagatattaaagtgaagttttcggacgctggccagcctatgagttttatcttagaatttcactttgaacccaacgaatatttcacaaatgaagtgttaacaaagacttacaggatgaggtcagaaccagatgattctgatcccttttcttttgatggaccagaaattatgggttgtacagggtgccagatagattggaaaaaaggaaagaatgttactttgaaaaccattaagaagaagcagaaacacaagggccgtgggacagttcgtactgtgactaaaacagtttccaagacttctttctttaacttttttgctcctcctgaagttcctgagaatggagatctggatgacgatgntgaggcaatactggctgcagactttgaaattggtcactttttacgtgagcgtataatcccaagatcagtgttatacttcactggagaagctattgaggacgatgacgatgactatgatgaagaaggtgaagaagctgatgaggaaggggaagaagaaggagatgaggaaaacgatccagactatgacccaaagaaggatcaaaacccagccgagtgcaagcagcagtgagcagtgactggccttgaggacggcctccctgtaatagcctaaacatgactcacttacttacagccttatggttttgtattttcttgatagaatcagtaagtttctaagggaaaggaaattgatattttgcagaccaatttgttctaaccagcatcccaactctagctctgtagccacgttaccgagtccagccctttactgcatgctcaggtcgctgcagtctggttctcctgagagatttcatcatgtagctattggtacattatgaaaccactgtgaacaat

SEQ ID NO: 103 - DNA, 1750 bp, Rattus norvegicus (Norway rat)
tggtgaggagaggacgaggatactagaatgtcaagtactgcgtcctaccggatcttcaattttgcaaggaatcgtattgctgtattacgagggggtagacgcttgtactccagggcagccacgagtaggaatcaagtgaaatggaggctcttttctcccgcatcattggccgtgaacgacagttctccacatggtggctttgctctgcggaaagcttacagacacacatcaaccgaggaagaggatttccacttgcagctcagccccgaacaggtcagtgacctgctccgagctggcgagtcatcccacaaggttctggatttcaacagcggagttccaaattcagtgttaaggtttgagagcaaccagttggcggccaattccccagtggaagaccgacaaggtgtggcttcctgcgtgcagacgagggggacggtgtttggtatttttgatgggcatggtggccatgcgtgtgcacaggcggtgagcgagaggcttttctattacatggcggtgtccctcatgtcccataagaccttggagcagatggaggaagccatggagaacatgaagcctttgctgcccatcctgcagtggctcaagcaccccggagacagtatttataaagatatcacatcggttcatctggaccacctccgagtctattggcaggaactccttgacctacatatggaaacgggactaagcactgaagaggcattgatgtactccttccagagactggactccgacatctcgctagaaattcaggctcctctggaagatgaggtaacgaagaacttatccctccaggttgctttttctggggcgacagcctgcatggcccacgtcgacggagttcacctgcacatagcaaatgctggcgactgccgagctatcctgggtgtccagggagacaatggagcgtggtcatgtttacctcttacctgtgaccacaatgcctggaatgaggcagagctgtcccggcttaagagagaacaccccgagtctgaggacaggacactcatcatagatgacaggctgctgggtgtcctcctaccctgcagggccttcggggacgtccagctaaaatggagtaaagagttgcagcggaacgtcctagagaggggatttgataccgaggccctcaacatctaccagtttaccccgccccactaccacactccaccctacctgactgctaagcctgaggtcacataccacaggcttaggccccaagataagttcctcgtgctggcctcagatggcctctgggacatgctggacaatgaggatgtggtaaggctggtggtggggcacctgtccaaggtcggtcaccagaagccagccctggatcaaagaccagccaacctgggccacatgcagagtctgctgctgcagaggaaagccagcggactccatgcagctgaccagaatgcagccacacatctgatcagacatgccatcgggagcaacgagtatggggaaatggagccagagcgtctggctgccatgttgacgctgccagaggatgtggccaggatgtaccgggatgacatcactgtcatggtggtgttttttaactcagaatcaattgatacctattttaaggagggttaagagtctcaccctgttgccaaggctaactcgaatgccctttatttagaacatttccactcattccttagtgagcaatccaaaccttagtaaagaacaggcagacataggttgctgagtaattccggaattc

SEQ ID NO: 104 - DNA, 1511 bp, Rattus norvegicus (Norway rat)
tgggctcaaggaaggaagcgttgtagctcgcgtccaggggcgcggcgtgtacgggtggctctcttcgcagctcgcggaggcgaaccgggcaacagtgacatggcagaacaggatgtggaaaatgagcttttggattatgatgaagatgaagagccccaggtaccccaggagagcactccagctcccccgaagaaagatgtcaaaggatcttatgtctccatccacagttctggcttccgggactttctgctgaagccggagctcctgagagctatagttgactgtggctttgaacatccttcagaggtccagcatgaatgtattccccaggccattctgggtatggatgtcctgtgccaagccaagtctgggatgggcaagacagctgtgtttgtgctggccaccctgcagcagattgaacccatcaatggccaggtatcagtactggtcatgtgccacacaagggagctggccttccagatcagcacggagtatgagcgcttctcgaagtacatgcccagtgtcaaggtatctgtgttctttggaggcctctccattaagaaagatgaagatgtgttaaagaagaactgtccccatgttgtggtggggacaccaggccggatcctggccctcgtgcggagcaggagcctcaacctgaggaatgtgaagcactttgtgctagatgaatgtgacaagatgctggaacagctggacatgcgccgggatgtacaggagatctttcgtctgacaccccatgagaagcaatgtatgatgttcagcgccaccctgagcaaggagatccggccagtctgcaggaagttcatgcaggatcctatggaggtgtttgtggacgacgagaccaagctcacactgcatgggctgcagcagtattacgtcaaactcaaggacagtgagaagaatcgtaaactcttcgacctccttgacgtgctagagtttaaccaggtggtgatctttgtcaagtctgtgcagcgctgcatggccctggcccagctcctagtggaacagaattttccggctatcgctattcacagaggcatggcccaggaggagcgcctgtcccgataccagcagttcaaggacttccagcgtcgcatcctagtggctactaatctgtttggcagaggcatggacattgagagagtcaacatcgtcttcaactatgacatgccagaggactcggatacctacctgcaccgagtggctcgtgctggtcgctttggtaccaagggtctggcagtcacttttgtgtcagatgagaatgatgccaaaatccttaatgacgttcaggaccggtttgaagtgaatgtggctgagcttccagaagaaatagatatctccacatacattgagcagagccggtaaccatgtgtgtagccaggcacatggctttctctcctgctgcttcagatcctcctcctaggtggcaatcggcggcctctctttttattgttccaaagctttagctatgttaagaataaacttttattgtg

SEQ ID NO: 105 - DNA, 3106 bp, Rattus norvegicus (Norway rat)
ctcactatagggctcgagcggccgcccgggcaggtctgaggtagaggcactgcctggacttgcagaacctcgattgggtccatatcatgctgacttttccttgctaggaatctcccaggagcttctggaaaatctaggacgaagactaaggtacaggagccctaagtccccatggcttcactgagccgggtcctccgtgtagctgccacctgtcctcgagggagatctgctcgcaacctggggctacagcccctagccagggaggccaggcccaccactgagaagagtgttccataccagtgcaccctgaaggaggaggcccaaggtgcctctgtggtgccccaaggaccaagccagcccctgcctagcacagccaatgttgtggtcattggtgggggcagtttgggctgccagactctgtaccacttggccaagctgggtgtaggtggagttgtgctgctggagagagagcgactgacctctgggaccacctggcacacagcaggcctactgtggcagctgcggcccagcgatgtggaagtagagcttctggctcacacacggcaagtggtgagccatgatctggaagaggagactgggcttcacacaggctggatccagaatggtggcctcttcatcgcctccaaccagcagcgcctggatgaatacaagaggctcatgtcgttgggcaaggcctacggtatagaatcccatgtgctgagccctgcagagaccaaggatctgtatccgctgatgaatgtggacgacctctatgggaccctgtatgtgcctcgggatggtaccatggacccggctggcacctgcactaccctcaccagagcagcagtggctaggggagctcaggtcattgaaaactgtgcagtgactggcatccgtgtgcggacagacgactttggagtgcggcgggtgacagctgtggagactcaacatggctccatccagacaccctgcgtggtcaactgtgcaggggtgtgggcgagctccgtgggccggatggctggagtgaaggtcccgctggtggccatgcaccatgcctacgttgtcactgagcgcattgaggggatccagaacatgcccaatgtccgggatcatgatgcttctgtctacctccgcctgcagggggatgccttgtctgtgggtggctatgaggccaaccccatcttttgggatgaggtgtcagacaaatttgcctttggcctctttgacctggactgggatgtgttcactcagcacattgaaggtgccattaaccgtgtccccgtgttggagaaaacggggatcaagtccactgtctgtggccctgaatccttcacacccgaccataagcccctgatgggggaggctcctgagctccgaggcttcttccttggctgtggcttcaacagtgcaggcatgatgttgggtggtggctgtggacaggagctggcccattggattgtgcatgggcgcccagagaaggacatgtacagctatgacatcaggcgtttccaccactcgctcacggaccacccacgctggatccgagagcgcagccacgagtcctatgccaagaactactcggttgtctttcctcacgatgagcccctggcgggccgcaacatgaggagggaccctctgcacgaggagctgcttggacaaggctgtgtgtttcaagaacgacagggctgggaacggccaggatggttcaacccccaagaaacagctcaggtcctagactacgactactatggggcctacggacaccaggcacacaaggactacgcctacagcaggctgctgggcgatgaatataccttcgacttcccaccccaccactgcgtgatccagaaggaatgtctggcctgcagaacggctgccgccgtgttcaacatgtcttacttcgggaagttctaccttctgggggcagacgccaggaaggctccagactggctcttctcagcagatgtcaaccgacccccaggctccacggtgtacacatgcatgctgaaccaacggggaggcaccgagagcgacctgactgttagctgcctggcccctggtgcccaggccagtcccctggcccctgcctttgaaggggatggctactacctagccgtaggtggggctgtggcccaacataactggtcccacataaacacggtgctgcaggatcaggagttccggtgccagcttatggattgttctgaagatctgggcatgctcagtatccagggcccagccagccgtgacattctccaggatgtgcttgatgctgacctgagcaatgaagccttccccttctccacccaccagctggtgagagctgctggacacctggtccgagccatccggctatcctttgtcggggagctgggatgggagctgcatgtgccccaagcgtcctgcttgcctgtgtaccgggctgtgatggctgcaggggcgaagcacggcctagtcaatgcaggctaccgtgccatcgactccctgagcattgagaaaggctatcggcactggcatgcagacctgaggtccgatgacagccccctggaggcagggttggccttcacctgcaagctcaagacctcagtgcccttcctaggccgagaggccctggagaagcagcgtgccacaggcctccgacgacgcctggtgtgcctcactgtggaagaggaggttcctatgttcggcctagaggccatctggagaaatggccaagtggtgggccatgtccggagagctgactttggattcaccgtgaacaagaccatcgcctatggctacatccgagaccccagtggagggccagtctctctggactttgtgaagaatggggactatgccttggagagaatgggggtcacctatgctgcccaggttcacctgaagtctccctttgatcctgacaacaagcgggtgaagggaatctattgatgggctgcagggtggaggctacagctgctcaggcccctggaaactgccacacttcccatacggcctgtggactcctatactgtacaaacagccctgtgtcctgagacccaagataagggcaaaacacagacttcccaccctgagcctccatctggtcctgctaactgccacagtc

SEQ ID NO: 106 - DNA, 1552 bp, Rattus sp.
ggcacgagggaacgtctaggcaacgtggtctccccgcccgcgggtaggcaaaggcgtttgcgcttcccagcgtctgaggcctagggagccttcagtagccgaaagttagtcttttgcagtggagtaagggctcgcggttagccgcgtagcgcccggatctggcctcaccatgttggtcctatttgaaacgtccgttggctacgccatctttaaggttctgaatgagaagaaacttcaagaggttgatagtttgtggaaagaatttgaaactccagagaaagcaaataaaatagtaaagctaaaacattttgagaaatttcaggatacagcagaagcattagcagcgttcacagctctgatggaaggcaagatcaataagcagctgaaaaaagttttgaagaaaatagtcaaagaagcccatgaacctctggctgtagctgatgctaagctaggaggggtcataaaggaaaaattgaatctcagctgtatccatagtcctgttgttaatgaacttatgagaggaatacgatcacaaatggatggcttgattcctggggtagaaccacgggagatggcagccatgtgtcttggactagcccacagcctatctcgatacagattgaaattcagtgctgataaagtagacacaatgatcgttcaggcaatttccttgttagatgacttggataaagaactaaacaactacattatgcggtgtagggaatggtatggctggcattttcctgagttagggaaaattatttcagataatttgacatactgcaagtgtttacagaaagttggagacaggaagaactatgcatctgccactctttctgaattcctgtcagaggaagtagaagctgaagtgaaagcagctgcagagatctctatgggaacagaggtttctgaagaagatatttgcaacattctacatctgtgtactcaggtcattgaaatttctgaatatagaactcagctgtatgaatatctgcaaaaccgaatgatggccattgcacccaatgttacagtcatggttggggagttggttggagcgcggcttattgctcatgcaggttctcttttgaatttggccaagcatgcagcttctacagttcagattctgggagcagaaaaggcacttttcagggccctcaaatctagacgagacacacctaaatatgggcttatttatcatgcttctcttgtaggccagacgagtcccaaacacaaaggaaagatttcacgaatgctggcggccaaaactgtgttggctatcagatacgacgcctttggtgaagattccagctctgcaatgggagctgagaacagagccaaattagaggccagattgaagattttggaggacagagggataagaaaaataagtggaacgggaaaggcattagcaaaagcagaaaagtatgaacacaaaagtgaagtgaagacttacgatccctctggtgactccacacttccaacttgttctaaaaaacgcaaaatagaagaggttgataaagaggatgaaattactgaaaaaaaaaaaaaaaaa

SEQ ID NO: 107 - DNA, 1068 bp, Rattus sp.
gtgtcctcatcagggtcacaaacctgtgaggaaaccctgaagacttgctctgtgatagcctgcggcagagacgggagagatgggcccaaaggggagaagggagaaccaggtcaagggctcaggggcttgcagggccctccagggaaactggggcctccaggaagtgtaggagcccctggaagtcaaggaccaaaaggccaaaaaggggatcgtggagacagcagagccattgaggtgaagctggcaaatatggaggcagagataaacaccctgaagtcaaaactggagctaaccaacaagttgcatgccttctccatgggtaaaaagtctgggaagaagttctttgtgaccaaccatgaaaggatgcccttttccaaagtcaaggccctgtgctcagagctccgaggcactgtggctatccccaggaatgctgaggagaacaaggccatccaagaagtggctaaaacctctgccttcctaggcatcacggacgaggtgactgaaggccaattcatgtatgtgacaggggggaggctcacctacagcaactggaaaaaggatgagcccaatgaccatggctctggggaagactgtgtcactatagtagacaacggtctgtggaatgacatctcctgccaagcttcccacacggctgtctgcgagttcccagcctgaggaaaccagtgcctccatcgtctccttggctctcagtcgcttccaaagaaaattcagttactggtttctcaagtttagtgttaagtgattcttttgatgggagagaatgtatttgcttgtggcatgaggacacgaatagaagctgaccgggaggcaccaggatctggttgagcacggagcaaaggtcacatccattttgctaggaacacagcaagaagtcaactatggaaaacctacaataaatatcccctgcccttttcaccagaggaccaaaggtggtccttatctgtgccagagtggcagctgatctcagccataaaagcacccaattccctttctccatgaattgtcactaagtggtgtcaaacgtgcctgtttgaagtcatcctcagt

SEQ ID NO: 108 - DNA, 542 bp, Rattus norvegicus (rat)
tggctaaaacctctgccttcctaggcatcacggacgaggtgactgaaggccaattcatgtatgtgacaggggggaggctcacctacagcaactggaaaaaggatgagcccaatgaccatggctctggggaagactgtgtcactatagtagacaacggtctgtggaatgacatctcctgccaagcttcccacacggctgtctgcgagttcccagcctgaggaaaccagtgcctccatcgtctccttggctctcagtcgcttccaaagaaaattcagttactggtttctcaagtttagtgttaagtgattcttttgatgggagagaatgtatttgcttgtggcatgaggacacgaatagaagctgaccgggaggcaccaggatctggttgagcacggagcaaaggtcacatccattttgctaggaacacagcaagaagtcaactatggaaaacctacaataaatatcccctgcccttttcaccagaggaccaaaggtggtccttatctgtgccagagtggcagctgatctcagccataaaagca

SEQ ID NO: 109 - DNA, 2479 bp, Rattus norvegicus (Norway rat)
caggtggagcgggcagggcgcggggcaccatgagcagcggcgccaacatcacctatgccagccgcaagcggcgcaagccggtgcagaaaacagtaaagcccgtccctgctgaaggaattaagtcaaacccttctaaacgacacagagaccggctgaacacagagttagaccgcctggctagcctgctgcccttcccacaagatgttattaataagctggacaaactctccgttctaaggctcagcgtcagctacctgagggccaagagcttctttgatgttgcattaaaatccaccccggctgacagaagtagaggccaggaccagtgtagagcacaagtcagagactggcaggacttgcaagaaggagagttcttgttacaggcgctgaatggctttgttctggttgtcacggcagatgccttggtcttctatgcgtcttccactatccaagattacctgggctttcagcaatctgatgtcatacatcagagcgtgtatgagcttatccatacagaagaccgagctgagttccagcgccagcttcactgggctctaaacccctcacagtgcacagactctgcacaaggagtagacgagactcatggcctcccacagccagcggtctactacacgccagaccagcttcctccagagaataccgctttcatggagaggtgcttcagatgccggctgaggtgcctgctggataattcatctggtttcctggcaatgaatttccaagggaggttaaagtatcttcatggacagaacaagaaagggaaagacggagcgctactccctccacagttggctttgtttgcaatagctactccacttcagccaccgtccatcctggaaattcgaaccaaaaacttcatcttcaggaccaaacacaaactggacttcacacctattggctgtgatgccaaagggcagcttattctgggctacacagaagtagagctgtgcaacaaaggatcgggatatcagtttatccacgccgctgacatgcttcactgcgcagaatcccacatccgcatgattaagactggagaaagtggcatgacagttttccggcttcttgcaaaacacagtcgatggaggtgggtccagtccaatgcacgcttgatttacagaaatggaagaccagattacatcatcgcaactcagagaccgctaacggatgaagaaggacgcgaacatttacagaagagaagtatgacactgccattcatgtttgccactggagaggctgtactgtacgagatctccagccctttctctcccataatggatcccttgccaatacgcaccaaaagcaacactagtaggaaagactgggctccccagtcaaccccgagtaaggattctttccaccccaattcccttatgagtgccttgatccaacaggacgagtccatctatctctgtcctccttcgagccccgcaccattagacagccattttctcatggactccatgagtgagtgcggcagttggcaaggcagctttgcagccgcaagcaatgaagctctgctgaaacacgaggaaatcagacacactcaggacgtgaaccttacactctctggaggcccctcggagctcttcccagataataaaaataatgacttgtatagcatcatgagaaacctagggatcgatttcgaagacatcagaagcatgcagaatgaggagttcttccgaaccgactcctccggtgaggttgacttcaaagacatcgacataacagacgaaatcctgacgtacgtgcaggattctctgaacaattcaactctgctgaattcagcttgccagcaacagcctgtgagccagcacctaagctgcatgctgcaggagcgcctgcagctggagcaacaacagcagcttcagcagcagcaccccactcagacactggagccccagcgccagttgtgtcaggtggaggtcccccagcacgagctgggtcagaaaacgaagcacatgcaagtcaatggcatgttcgccagttggaaccctgcccctcccgtgtctttcagctgtcctcagcaggaacgaaagcactatagcctcttctccggcttacaggggactgcacaggagtttccctacaagtcagaggtggacagtatgccttacacacagaactttgctccctgcaaccagtcactgctaccagaacattccaagggtacacagttggacttccctggaagggattttgaacgatccctgcaccctaacgcttctaatttagaagactttgtcagttgtttacaagttcctgaaaaccaaagacacgggataaactcacagtcagccatgtttcagagtccgagcattttaaatgaagcctactcggcagacttgagcagcattggccaccttcagactgctgctcacctccctcgcctggcagaagcccagcctcttcctgatatcacacccagcggattcctgtagctcgaggccaggatgaa

SEQ ID NO: 110 - DNA, 7420 bp, Rattus norvegicus (Norway rat)
atggatccaagtggggtcaaagtgctggaaacagccgaggacatccaggagagacgacagcaggttctggatcggtaccaccgcttcaaggagctctctaccttgcggcggcagaaactggaggattcctatcgcttccagttttttcagagagatgctgaggagctggagaagtggattcaggagaagcttcaagttgcctctgatgagaactacaaagaccccaccaacttgcagggaaagctccagaaacaccaagcctttgaagctgaagtacaggccaactcaggagccattgtgaagctggatgagacaggaaacttgatgatttctgaagggcactttgcatctgagaccatccggacacgtttaatggagctgcaccgccagtgggagttgcttttggagaagatgcgggagaaaggaatcaaactgctgcaggcacagaagctggtgcagtatttgcgggagtgtgaggatgtaatggactggatcaatgacaaggaagcaattgtgacgtctgaggagctgggccaggatttggagcatgtagaggtactacagaagaagtttgaagagtttcaaactgatctggctgctcatgaagaaagagttaatgaagtaaaccagtttgctgccaaacttatccaggagcagcacccggaagaggagctgatcaagaccaagcaggaggaggtgaatgcagcttggcagcgactgaaaggcctggctcttcaaaggcaggggaagctctttggtgctgccgaggttcagcgctttaacagggatgtagatgagaccattggttggattaaggagaaagagcagttaatggcctctgatgactttggcagagacttagcaagtgttcaagctctgcttcggaagcatgagggtctggagagagatcttgctgctctagaggacaaggtgaaagccctgtgtgccgaggctgaccgcctgcaacagtcacaccctctgagtgccaaccagatccaggtgaagcgagaggaactaattaccaactgggagcagatccgaactctggccgcagagagacatgcacggcttgatgactcatacaggcttcagcgctttcttgctgacttccgtgacctcacgagctgggtgactgaaatgaaagccctcatcaatgcagacgagcttgccaatgacgtggctggtgctgaggccctgctggacaggcatcaagagcacaagggtgaaatcgatgctcatgaagatagctttaagtctgcagatgagtctgggcaggccctactcgctgctggtcactatgcctcagatgaagtgagggagaagctgagcatcctctctgaggagagagctgccctgctggagctgtgggagcttcggaggcagcagtatgagcagtgcatggacttgcagctcttctaccgagacactgagcaggtggacaactggatgagcaaacaggaggcattcctgctaaatgaagatttgggtgactccttagacagtgtggaagctcttttgaagaagcatgaggactttgagaaatctctcagtgcccaggaagaaaaaatcacagcacttgatgagtttgcaaccaagcttattcagaacaaccactacgcaatggaagatgtagccactcgacgagatgctctcctgagccgccgcaatgccctccatgagcgagccatgcatcgccgggcacagctggccgattccttccacctgcagcagttcttccgcgattccgatgagctcaaaagttgggtcaatgagaagatgaaaacggccactgatgaagcttacaaagatccgtccaacctgcaagggaaagtccaaaagcaccaggcttttgaggctgagctctcagccaaccagagccgtattgatgccctagagaaagctgggcaaaaactaatagatgtgaaccactatgccaaggaagaagtagcagctcggatgaatgaggtcatcagtttgtggaagaaacttctagaggccacagaactgaaaggagtcaagctccgagaagccaaccagcagcaacaatttaatcgcaatgttgaggacattgagttgtggctgtatgaagttgaaggtcacttggcttcagatgattatggtaaagacctcactaatgtccagaacctccagaagaagcatgctctgctagaggcagatgttgctgctcaccaggatcgaattgacggcatcacaattcaggcccgccagttccaagatgctggccatttcgatgccgaaaacattaaaaagaagcaagaggcccttgtagctcgctatgaggctctcaaggaacccatggtggcccggaagcagaagctggcagattctcttcgtctgcagcagctcttccgagatgtggaggatgaggaaacctggattcgagaaaaggagcctattgctgcgtccactaacagaggcaaagatcttattggagtccagaatctgctaaagaagcaccaagctttacaggcagaaattgctggccatgaacctcgcatcaaagcagtgacacaaaagggcaatgccatggtggaggaaggccattttgctgctgaggatgtgaaggccaaactgagtgagctcaaccagaagtgggaggcactgaaagccaaagcctcccagcggaggcaggatctggaggactcactacaggcccagcagtactttgccgacgccaatgaagctgagtcctggatgcgggagaaggagcccattgtgggcagtaccgactatgggaaggatgaagactctgctgaggctctgctcaagaagcatgaagctttgatgtccgatctcagtgcctacggcagcagcattcaagctttgcgagagcaggctcagtcatgccggcaacaagtggcccccatggatgatgagactggcaaggagctggtcttggctctctatgactatcaagagaagagccctcgtgaggtcaccatgaagaaaggggatatcctcaccttgctcaacagcacaaacaaggactggtggaaagtggaagtgaatgaccgtcagggttttgtgccagctgcgtatgtgaagaagctggaccccgcccagtcagcctcaagggagaacctcctggaagaacagggcagcattgctctgcggcaggggcagatcgacaaccagacacgcataactaaggaggccggcagtgtatctctgcgtatgaaacaggtggaagaactgtatcagtctctgctggagctgggtgagaagagaaaaggcatgttggagaagagttgcaagaagttcatgttgttccgggaagcgaacgagctacagcagtggatcaacgagaaggaagctgctctaacgagtgaagaggttggcgctgacttggagcaggtcgaggtgctgcagaagaagttcgatgacttccagaaggatctgaaagccaatgagtcccggctgaaggacattaacaaagtggccgaggacctggagtctgaaggtctcatggcggaagaagtgcaggccgtgcagcagcaggaggtgtatggtatgatgcccagggatgaagcagattccaagaccgcctccccatggaagtctgctcgactgatggtccacacagtggccaccttcaactccatcaaggagctgaatgagcgctggcggtccctgcaacagctggctgaggaacgtagccagctcctgggcagtgcacacgaagtacagaggttccacagggatgcggatgaaaccaaagaatggattgaggagaagaaccaggctctgaacacagacaactatggccatgatctagctagcgtccaggccctgcagcgcaaacacgaaggcttcgagagggaccttgcagctcttggtgacaaggtgaattcccttggggaaacagcccagaggctgatccagtcccaccctgaatctgcagaggacttaaaggaaaagtgcacagagttaaaccaggcctggaccagcctagggaagcgtgcagaccagcgcaaggccaaactgggtgactcccatgacctgcagcgcttccttagcgatttccgggacctcatgtcttggatcaatggaatacgagggttggtatcttcagatgaactggccaaggatgtcactggagctgaggctttgctggagcgacaccaggaacaccggacagaaattgatgccagggctggcactttccaggcatttgagcagtttgggcagcagctgttggctcatgggcactatgccagcccagagatcaaggagaaacttgatattcttgaccaggagcgcacagacctggagaaggcctgggttcagcgcagaatgatgctggaccactgcctggagttgcagctgttccatcgagactgtgagcaagcagagaactggatggctgcccgggaagccttcctaaacacagaagacaaaggagactcgctggacagtgtggaggctctgatcaaaaaacatgaagacttcgacaaagctatcaatgtccaggaggagaagatagctgccctgcaggcctttgccgaccagctcattgctgtggaccactatgccaagggagacattgcaaaccgacgcaatgaggtcctggacaggtggcgccgcctaaaagcccagatgattgagaaaaggtcaaagctcggagaatctcaaacacttcagcagttcagccgggatgtagatgagattgaagcctggatcagtgagaagttacaaacagccagcgatgagtcatacaaggaccccaccaacatccagagcaagcaccagaagcaccaagcctttgaggcagaactgcacgccaatgctgaccgaatccgtggagttattgacatgggcaactccctcattgagcgtggggcctgtgctggcagtgaggatgctgtcaaggcccgcctggctgcccttgcagaccagtggcagttcctggtgcagaagtcagctgagaagagccagaagctgaaagaggccaataagcagcagaacttcaacaccgggatcaaagactttgacttctggctttctgaggtggaggctctcctggcatctgaagactacggcaaagacctggcttccgtgaacaacctgctcaaaaagcatcagctgctggaggcagacatatcggcccacgaggatcgtctgaaggacctgaacagccaggctgacagcctgatgactagcagtgccttcgacacctcccaagtgaaagagaagcgggacaccatcaatggacgctttcagaagatcaagagcatggcaacctcccgaagagcaaaactgagcgagtcccatcgcctgcaccagtttttccgagacatggatgacgaggagtcctggatcaaggagaagaagttgttagtgagctctgaggactatggcagagacctcactggtgttcaaaatctgaggaagaaacacaagcggctagaagccgaactggccgcacacgaaccagccattcagggtgtcctggacacggggaagaagctgtctgatgacaacaccatcgggcaggaggagatccagcagcgtctcgcacagtttgtggagcactggaaggaactgaaacagctagcagctgcacggggccagcggctggaggagtccttggagtatcagcagtttgtggccaacgtggaggaggaggaggcttggatcaatgagaagatgaccctggtggccagcgaagactacggggacactcttgctgccatccagggcttactgaagaaacatgaagcttttgagacagacttcactgtccacaaggatcgagtgaatgatgtctgtactaatggacaagacctcattaagaagaacaatcaccatgaggagaacatctcttcaaagatgaagggtctgaatggtaaagtgtctgacctggagaaagcagcagctcagaggaaagcgaagctggatgagaactcggccttccttcagttcaattggaaggctgacgtggtggagtcctggattggtgaaaaggagaacagcttgaaaacagatgattatggccgagatctgtcttctgtccaaactctgctcaccaagcaggagacatttgatgctggcctgcaggccttccagcaggagggcattgccaatatcactgccctcaaagaccagctgctagctgccaagcacattcagtcgaaggccatcgaggcccgacatgcctccctcatgaagaggtggacccagctgttggccaattcagctacccgcaagaagaagttgctagaggcccagagtcatttccgaaaggtagaagacctcttcctgacctttgccaaaaaggcatcggctttcaacagctggtttgagaatgcagaagaggacctcacagacccagtgcgctgcaactctctggaagaaatcaaagccctccgagaggctcatgatgccttccgctcatcgctcagctctgcgcaggccgacttcaaccagctagccgagctggaccgtcagatcaagagtttccgagtggcctccaatccctacacctggttcaccatggaggccctggaagagacgtggaggaacctacagaagatcattaaggagcgagaactggagctgcagaaggaacagcggcggcaggaggagaatgacaagctacgccaagagtttgcccagcatgccaacgcgttccaccagtggatccaggaaacaagaacgtatctcctcgacgggtcctgcatggtcgaagagtcgggaactctggaatctcagcttgaagctaccaaacgcaagcaccaggagattcgggccatgagaagtcagctgaagaagattgaggacctgggggctgccatggaggaagccctcatcctggacaacaagtacactgagcacagcactgtgggcctggcccagcagtgggaccagttagaccagctgggcatgcgcatgcagcacaacctggagcagcagatccaggccaggaacacaacaggagtcactgaggaggccctcaaggagttcagcatgatgttcaaacacttcgacaaggacaagtctggccggctgaatcatcaagagttcaaatcctgccttcgttctctgggttacgacctgccaatggttgaggaaggagagcctgatcctgagtttgaggccatactggacactgttgatcccaacagggacggccacgtctccctgcaagagtacatggctttcatgatcagccgtgaaaccgagaatgtcaagtccagtgaagagatcgagagtgctttccgggccctcagctccgagggcaagccttatgtgaccaaggaggagctctaccagaacctgacccgggaacaagctgactactgtgtctcccacatgaagccctatgtggatggcaagggccgcgaacttccaactgccttcgactacgtggagttcacccgctctctctttgtgaattgat

SEQ ID NO: 111 - DNA, 1259 bp, Rattus norvegicus (Norway rat)
ggcacgagggcgagggtgcagccccggagcggcggcggggcaaaatgaaaaacgaaattgctgctgttgtcttctttttcacaaggctggttcgaaagcatgataagttgaaaaaagaagcagttgagaggtttgctgagaaattgactcaaatacttcaagagaaatacaaaaatcactggtatccagaaaaaccctcaaaaggacaagcctacagatgcattcgtgtcaataagtttcagagagttgatcccgacgtcctgaaagcctgtgaggacagctgcatcctgtacagtgacctgggcttgccaaaggagcttacactctgggtggatccgtgtgaggtgtgctgccggtatggaaagaaaaacaatgcattcattgttgccagctttgaaaatgaggatgagaacaaggatgagatctccaagaaagttagcagggctcttgataaggtgacctctgattatcattcagggtcctcctcctcagatgaagacacaagcaaggaagtagaagtgaaaccgagtgcagtggctacaacgccaagccccgtgtaccagatttcagaactgatattcccacctcttccaatgtggcaccctttgcccagaaaaaagccaggaatgtaccgagggggtggccatcagagtcactaccctcctcctgttccatttgcttatccaagtccaggaaggaagaataaagcgttccgcccaattccagtgacatgggtacctcctcctggaatgcattgtgatcggaatcactggattaatcctcacatgttagcacctcactagttcatttggattgggcggatgtcattttgatagaaaggaagaaataccttcttagatacttaagagtttcacaacttgtagtgaagtcagatggacaaaaccatcaggcttatttttatagaaaagctattgagataatctttcttaaagtatatatatatatgcactttagatatattgatatagtttgagaaactttattaaagttagtcaagtgcctgagtttttaatattggacttgagtatttatatattgtgcattgactctgttggatacaaaacactgtaggagggcgatatgttttagcacctttgagcatttactttatggagaatatgtaagttatttatacagaaggacatttattttatgtcacatagaagaattgtgtgaaatcatgtagttgcaaataaaaagtagtttgaggcgtgaaaaaaaaaaaaaaaaaaaaaaaa

SEQ ID NO: 112 - DNA, 1563 bp, Rattus norvegicus (Norway rat)
gtcaagatgcagttctcaggaaggacccggaagaagctgagattggcaggtgaccagagaaacgcttgttaccctcacagccttcagttctatctgcagccacctactgaaaacatatcattgacagagtttgaaagcttggcttttgatagagtaaaattgcttaaagcaattgagaatcttggtgtgagctatgtgaaaggaaccgaacagtaccagagtaaactggaggctgagattcgaaagctcaagttttcgtacagggagaacctggaggatgagtacgagcctcggaggagggaccacatctcccacttcatcctgcgcctcgcttactgccagtcggaagatcttagacggtggtttattcaacaggagatggatctgcttcggttccgattcagtattttacccaaggataaagtccagagtttcttgaaggatactcacttgcattttgaggctatcagtgatgaggagaagacccttcgggaacaggatatcatggcgtcctctcccagcctaagtggggtcaggtgggaatcggagtcagtgtataaggtcccctttgctgacgctctggacctgttcagaggaaggaaagtctacttggaagacggctttgcttatgtgccacttaaggacattgtggccattatcctgaacgagtttagagccacgctgtctaaggccttggcactaacagccaggtccctgcctgctgtgcagtccgatgaacgacttcagcctctgctcagccacctcagtcattcttacaccggccaagattatagtacccagaagagcaccgggaagatttccttagatcagattgattcgctttcaacaaaatccttcccaccttgcatgcgtcagctgcacaaggcgctgagggaaaaccaccatcttcgtcatggaggccggatgcagtatggcctgttcctcaagggcattgggctaacgttggagcaagcattgcagttctggaagcaagagtttatcaaaggaaagatggacccagacaagtttgataaaggttactcttacaatatccgacatagctttggaaaggaaggcaagaggacagactatacgccattcagttgcatgaagattatcctgaccaacccaccaagccagggggatttccatgggtgcccattccgtcacagtgatgcagagctgctgaagcagaagatgcagacctacaagatccctgcctcggggatcagccagattttggatttggtaaaggggaatcattaccaggtggcctgtcagaagtacttcgagatgacgcacaatgtggacgattgtggcttttctttgaatcatccaaatcagttcttttttgagagccagcgaatcctaactggtggcaaagatatcaagaaggaagcaagccacccagaaacgcctcagcacaaacccagcacccagaagaccaaggatgccacgtctgctctggcctctctagattcctccctggaaatggatctggaggggctagaagactactttagtaaatgacgtggcccctggagcaactggagcaaatacatt

SEQ ID NO: 113 - DNA, 4128 bp, Rattus norvegicus (Norway rat)
ggttccggctgtgggcagcagggtggtccgcgactgcggccggaagcaggctgagcggctctcggcgagcgccgcctgtacttccggggacttcagcctagctcttgagttttccctgtaggcggcgcgggagggaaaagtttgcagggccgtgctgggaagatcacctccgcttcccaatgtgagcagtttctcgaacgctctctctagaaggttgcccagagaggtggtggacgggaacatgaggcagcgtctcctcttcctgaccactttggtgcctttcgtcctggcaccccgacctccggaggaaccaggctctggctcccacctgcgacttgagaagcttgattctttgctctcagactacgatatcctctctttatctaatatccagcagcactccataaggaaaagggatctacagtctgcgacacacttagaaacactactaactttttcagctttgaaaaggcattttaaattatacttgacatcaagtacagaacgcttttcacagaacttgcgagtcgtggtggtggatgggaaagaggaaagcgagtacagtgtgaagtggcaggacttcttcagcggacatgtggttggtgagcctgactctagggttctagcgcacataggagatgatgatgtcacagtaagaatcaacacagatggggcagaatataacatagagccactttggaggtttgttaatgatactaaagataaaaggatgctggtgtataagtctgaagatatcaaggatttttcacgtttgcagtctccaaaagtatgtggttatttaaatgcagatagtgaagagttgcttccaaaagggctcatagacagagagccatctgaagagtttgtccgtcgagtgaagaggcgagctgaacctaacccattgaagaatacttgtaaattactggtggtggcagatcatcgattttataagtacatgggccgaggagaagagagcactactacaaattacttaatagagttaattgaccgagttgatgacatataccggaacacctcgtgggacaatgcaggatttaaaggttatggagtacagatagaacagattcgaattctcaagtctccacaagaggtaaaacctggtgaaagacacttcaatatggcaaaaagttttccaaatgaagaaaaggatgcttgggatgtgaagatgctgctggagcaatttagccttgatatagctgaagaggcctctaaagtctgcctggctcatcttttcacctaccaagattttgatatgggaactcttggattagcttacgttggttctcccagagcaaacagtcatggaggggtttgtccaaaagcttattacaacccaggtgtgaagaagaacatctatttgaatagtggtctgacaagtacaaaaaattatggtaaaaccatccttacaaaggaggctgacctggttacaactcatgaattgggacacaattttggagcagaacatgatcctgatgggctggcagagtgtgccccaaatgaggaccaaggaggaaagtatgttatgtaccccatagctgtgagtggtgaccatgagaataataagatgttttcaaactgcagtaaacagtccatctacaagaccatagaaagcaaggctcaagagtgcttccaggagcgcagcaacaaggtgtgcggcaactccagggtggacgaaggagaagagtgtgacccgggcatcatgtacctgaacaacgacacctgctgcaatagtgactgcacactgaagccaggtgtgcagtgcagtgataggaatagtccttgctgtaaaaattgtcagtttgagacggcccagaagaagtgccaggaggctatcaatgctacttgcaaaggagtgtcttactgcacagggaatagcagtgagtgccccccaccaggagatgctgaagatgacactgtgtgcttggacctgggcaagtgcaaggctgggaaatgcatccctttctgcaagagggagcaggagctggagtcctgcgcatgtgctgacaccgacaactcgtgcaaggtatgctgcaggaacctttctggcccatgtgtgccttacgtcgatgcagagcaaaagaacttatttttgaggaaagggaagccctgtacagtagggttttgtgacatgaatggcaaatgtgagaaacgggtacaggacgtaattgagcggttttgggatttcattgaccagctgagcatcaacacttttgggaagtttctggcagacaacatcgttgggtctgttctggttttctccttgatattttggattcctttcagcattcttgtccactgtgtggataagaaactggacaagcagtatgagtccctgtctctgtttcatcacagtaacattgagatgttgagcagcatggactcagcatctgttcgcattatcaagccgttccctgcaccccagactccaggtcgtctgcaggccctgcagccggctgcaatgatgccgccagtgtctgcggctccaaaactggatcaccagaggatggacaccatccaggaagaccccagcacagattcacatgtggatgatgatggctttgagaaggaccccttccccaacagcagtgcagccgccaagtcctttgaggacctcacagaccacccagtcaccaggagtgagaaggccgcctccttcaagctgcagcgtcagagccgagttgatagcaaagagacagagtgttagtgggagcctgggcctgctctgggggacacagacctacagatgttccacagagctgacctgaatcaaaatagactgtaatgatctgagaaacgggagcagcttagcagatgctggtcatgtgacaggaccttcacatgacatcctgtgtatgtaggccctttgaagaggtgaggtaaatctggcttatttaaggctttcaggttttggggttttcttttgtaatctaaaaatctcctttgacctgtggtgcagaagcagaaaataaggctggatcaagttcctggtgacagcactgattaagccttcagtctgtttttctgtatgctgtaaggtcctctcactacggtgaagcacttagcagtgaggataactggaacacagactttttgggggttttggccttcacatgtgcgttgtctccaaatgccgtctgtcttggcactgaactttgtggatacagtcctttccaagatgaagactagctctggaacagtctatacaaacagccacatgaacttcaagatggcctattaactgcttagccccaggttccctggacagtttttccgttttgcaaaaagtgtcttcacgggtctctaaacattgtttgtcttaaaaaatactgggctggagagttggccccacagttaagagcacttggtttcattcccagtacccacacggtggctcttaactccaatcccaggggagatgacatcttctgaactctagaacacaaggcatgcattggtgcagtcaaacatgcaggcaacacacacaaatttagaaagccaagtgctgtaagaagttgcacatcccccaacctacagtgcttcgcggtctgagctggagtggagctctctcctgaacactctggaaggctggcaggtgctgagctggctagggagacgggtggggcccagccctggaagaaccgtcttcagcctcagcaagcagacactcgcgttacctcaggctttggggcttcaggacccaggatgttttgtacttattgtgtgaggataaataccattagcctgaattctcatttctgtaagttttagttataaaagctttttttcttctaagaattgcaatgtgctcaccagcaaacacgtcttaaccagaataacttgtaactctgaggacagttaaccaaacctgtgccttgtctctcctgagggtgtctgttacactaatacttgaacatgtaccttgtggtattggctccttttactagtcatgacagccttatatgttagttacactttgaggatttgctctaaggtgagtggggtgtgtgggtgtatgtatgaatgaaacagttggcagaatataagaaaaccatttttataaaattgtgactttttaaaacaaaaaaaaaaaaaaaaaaaaaaaaaaaa

SEQ ID NO: 114 - DNA, 1200 bp, Rattus norvegicus (Norway rat)
ttcggtcgactgagagatcctgagcagtgccacctcaccagcctcgagatggacaacaggaagcgcctggcctatgccatcatccagttcctgcatggccagctgcggcacggtgggctctcgtccgacgcccaggagagcctagaggttgccatccagtgtctggaaacagcctttggggtgacgctggaggacagtgaccttgctctcccgcagaccctgccagagatatttgaagcagccactgccagcaaggagatgccacaggacccgaggggccctgacaggacaccaccctctgaggaggactcagctgaggcagagcgccttaaaacagaaggtaacgagcagatgaagttggaaaactttgaggcagcagtgcacctctatggcaaagccattgagctcaaccccgccaacgccgtttacttctgtaacagagctgcggcctacagcaagctgggaaactacgtgggggcggtacaggactgtgagcgcgccattggcattgatcccgggtacagcaaggcctatggccgcatgggccttgcgctgtccagcctgaacaaacatgcggaggctgtggcgtactacaagaaggccctggagctggaccctgacaacgacacgtacaagtccaacctcaagatcgcagagctgaagttacgggaggcgccgagccctacgggcggcgtgggcagcttagacatcgctggcctgctgaacaacccgcacttcatcactatggcttcgagcttaatgaacagcccccagctccagcagctcatgtcgggaatgatctctggaggccataaccctctgggcaccccaggcagcagtccacagcacagtgacctggccagtctcatccaggcgggccagcagtttgcacagcagatgcagcagcagaacccagagttcgtggagcaaatccggagccaggtggtgcgcagccggacacccagtgccagccacgaggagcagcaagagtgacaacgctgacccgagtggcccctctgctccgcgcgcggcctcctggtgttttagcaatttctccatcgggctgctcaagagagaaactggacctgcatgttaagacggactcatccccccgccctgtgttctcttcatccctccccctttgttttttgtactcgtaactggctccacaccttcctggaagagtctacatttgactac

SEQ ID NO: 115 - DNA, 1194 bp, Rattus norvegicus (Norway rat)
agagagagagagagagagagagagagagagaacccacccacccggcgactaatctgatcccggctgtcccccgggaccagcgaggtcccagaagacccacgagggagcgggcgtaacgcgtggctgcgggtgggagccatggacgccttcatccgagtcgccaaccaaagccaaggtcgggaccgacttttcagagccactcaacacgcatgcatgttgcttagatatttgttagagtctaaggctggcaaagaggcggtggtaacgaagctcaagaatctggagactagtgtgagcactggccgtaaatggttcagactaggcaacgtgctccatgccatccaggccactgagcagagcatccaagccactgaccttgtgccccgcctatgcctaacattagccaacctgaaccgcgtggtttattacatctgtgacactgtcctctgggcgaagagtgtgggtctgacatctggaatcaacagagagaagtggcaaatgcgggcggcccgccactactactatttcctcttgctgagcctggtccgggatctgtatgaggtcttgctgcatatgggacaagttgcacgcgacagagcaaagagagagaagtcctccggggaccctcctaagtacagcgtcgctaatgaagaaagtgaatggctccagtccttcctcctcctcctcttccagtctctaaagcgaaatccgcccttattcctggacaccgtgaagaacttctgtgacatcctgatccctttgaaccagctcgggatctacaagtccaaccttggcgtggtaggatttggaggtctcgtgtcctctgtggctggcctcatcactgtggtgtatcctcagttgaaactgaaggcccgctagggtgtttggaaaatttaagactgacgttcagtggagcaaacatttgcttttgtcatgatgtctactgtacttaattttttttaatcatgtgagcatcttaccaaccggtgatgtgagcagaggtaggacccacaacggagcctgaagactgatgacgtttttgtaaacacggcagtaacttctgcacatttccccttcagtgacttctgactactgcaaaaacatttgtgccgtcattgaagacgtgtaaaggggaagtcagaacattgctgagcatcttttctgtacatagtaagagctcatatatctaacaaa

SEQ ID NO: 116 - DNA, 1893 bp, Rattus sp.
gggtgtagaacggtgccaccactgtcttcttcgccaccatgggggcccagctgagcacgttgagccgagtggtactctccccggtctggttcgtctacagcctcttcatgaagctgtttcagcgctcctcaccggccatcaccctcgagaaccccgacatcaagtaccctctgcggctcatcgacaaggagattatcagccacgacactcggcgcttccgatttgcactcccttcgccccagcacatcctgggccttcctatcggccagcacatctacctctccaccaggatcgatggcaacttggtcattcgtccctacacccctgtgtctagtgatgatgacaagggctttgtggacttggtggtcaaggtttacttcaaggacacgcatcccaagtttccagctggagggaaaatgtctcagtacctggaaaacatgaatattggagacaccattgaattccggggccccaatgggctactggtctaccagggcaaagggaagttcgccatccgtgcagacaagaagtccaaccctgttgtcaggacggtgaagtctgtaggcatgattgcaggagggacaggcatcaccccaatgctgcaggtgatccgagccgtcttgaaggacccgaacgaccacactgtgtgctatctgctcttcgccaaccagtccgagaaagacatcctgctgcggcctgagctggaggaactgaggaacgaacattcttctcgcttcaagctctggtacacagtggacaaagcccccgatgcctgggactatagccaaggcttcgtgaatgaggagatgatcagggaccatcttccacctcctggggaggagacactgatactgatgtgtggacccccaccgatgatccagtttgcctgtttgccaaacctggagcgtgtgggccatcccaaggagcgatgcttcaccttctgatggctggatgctggccactcccatgcctgctgctcacgcactcaccacaaccaccttccaccccttccttccccactactgtcctttaccctgacatatgcccacatccatgctggggcctgggttcagcctggcctgcccagccctggtcatccagctgtactggcccctgaggggcccctttgggagcaggcctgtgtatcaggtggcttctgttgaccactttctgaataggcttctgtctggtactaactggccattaccagagatggtccatgaccacccctttatacacacacacatacacatacagagacagagagacagagagacagagatagacagagatagacagagagacagatacagacatagagacagacagagacagagagagaggagtcagagagctgttagtaccatgtctacccgttaccatggaccgcaatgtgtagtaaggaaatgaaaggtaaacagttatctacagtcctaggaaccatgcctgtcacctaaccacctactgccttaggctatggcctggtctgtgcccctaaacactacattagacagtgacacccagaggttctcttaggagggtgtctggcagtgacaggccagcccccacttgctggccaggagttccttgggtcagcacgtggacccttccaaaaccccacacactgcccctcccctccatgatgccttgagcaccctaagttgtcagcccaacagagtttggtagaccttggggtacctggcttgtttctccatcccatacctccctcccatctggttcccagcctggggggttctgagcagagcctcttttctcggagacagacccggtgcctggcgctgccttcagcagacagcagacagcctcctgcacactggctttttttagtcatttatgggcaaaatgagttaaaataaaactttgcaaatcctg

SEQ ID NO: 117 - DNA, 1893 bp, Rattus sp.; identical to SEQ ID NO: 116

SEQ ID NO: 118 - DNA, 1052 bp, Rattus sp.
ggacgtaccaaaatgagcgcacctccaataaagatacacatcatgtcgtcttcacatctcttctacctggcactctgcttgctcacctttaccagctcggccacagccggaccagagaccctttgcggggctgagctggtggacgctcttcagttcgtgtgtggaccaaggggcttttacttcaacaagcccacaggctatggctccagcattcggagggcaccacagacgggcattgtggatgagtgttgcttccggagctgtgatctgaggaggctggagatgtactgtgctccgctgaagcctacaaagtcagctcgttccatccgggcccagcgccacactgacatgcccaagactcagaaggaagtacacttgaagaacacaagtagaggaagtgcaggaaacaagacctacagaatgtaggaggagcctcccgaggaacagaaaatgccacgtcaccgcaagatcctttgctgcttgagcaacctgcaaaacatcggaacacctgccaaatatcaataatgagttcaataccatttcagagatgggcatttccctcaatgaaatacacaagtaaacattccgacattgtctttaggagtggtttgttaaaaaaaaaaacaaaaaacaaaaacaaaaacaaaaaaaaagcttgcaccttgcaaaagtggtcctggcgtgggtagattgctgttaatcctttatcaataacgttctatagagaatatataaatatatatataattatatctcctagtccctgcctcttaagagccgaaaatgcatgggtgttgtagacattcggttgcactaaattcctctctgaattttggctgctgaagccgttcatttagcaactgtttataggtggttgatgaatggttccttatctccatttcttcctatgtagcttaagccgcttccttcacagaatctaataatctcgtctaggccattagccctgccctttcttaacattcttgtatttgttgaatttggcctcctcgaaagcaatagcaactgggtggcccacccaagttttaacgccc

SEQ ID NO: 119 - DNA, 1744 bp, Rattus norvegicus (Norway rat)
ctgcagtgtgaagggtgttgtcttacctctcgcagactttcccattcccagccctgatttccccactggacccttctccttctgaaccagcatcctgcctggtttgagcagtcatggcctcacgggtgaatgatcaaagccaggcttcaaggaatgggctgaagggaaaggtgctaactctggacactatgaacccatgtgtgcggagggtggagtatgcagttcgaggacccattgtgcagcgtgccttggagctggagcaggagctgcgtcagggtgtgaagaagccgtttactgaggtcatccgtgccaacattggggatgcacaagccatggggcagagacccatcaccttcttccgccaggtcctggccctctgtgtctaccccaatcttctgagcagtcctgacttcccagaggatgccaagagaagggcagaacgcatcttgcaggcctgcgggggccacagcctgggtgcctatagcattagctctggaatccagccgatccgggaggatgtggcgcaatacattgagagaagagacggaggcatccccgcagacccgaacaacatatttctatccacaggggccagcgatgccatcgtgacaatgctcaagctgctggtatctggcgagggccgtgcacgaacaggtgtactcattcccattcctcagtacccactgtactcagccgcgctggctgaactggacgccgtgcaagtggactactacctggacgaagagcgcgcctgggctctggacatcgcagagctgcggcgcgctctgtgccaggcacgtgaccgttgctgccctcgagtactgtgcgtcatcaaccccggcaaccccactgggcaggtgcagacccgtgagtgcatcgaggccgtaatccgctttgctttcaaagaaggactcttcttgatggctgatgaggtataccaggacaacgtgtatgccgagggctctcagttccattcattcaagaaggtgctcatggagatggggccaccgtattccacgcagcaggagcttgcttctttccactcagtctctaagggctacatgggcgagtgcgggtttcgtggtggctatgtggaggtggtaaacatggatgctgaggtgcagaaacagatggggaagctgatgagtgtgcggctgtgtccaccagtgccaggccaggccttgatggacatggtggtcagtccgccaacaccctccgagccgtccttcaagcagtttcaagcagagagacaggaggtgctggctgaactggcagccaaggctaagctcacggagcaggtcttcaatgaggctcccgggatccgctgcaacccagtgcagggcgccatgtattccttccctcaagtgcagctgcccttgaaagcggtgcagcgtgctcaggaactgggcctggcccctgacatgttcttctgcctgtgcctcctggaagagactggcatctgcgttgtgcccgggagtggctttgggcagcaggagggcacctatcatttccggatgaccattctgccccccatggagaaactgcggctgctgctggaaaaactcagtcacttccatgccaagttcacccatgagtactcctgaagccactgctagggccacactggacagtctctgacgcaacaaaccgagggtccttaggaaccctcagtatttctgattttgtctagggtctcggtaactgtcctgcgggtccctaataaatctgatgtcagcctgaaaaa

SEQ ID NO: 120 - DNA, 2064 bp, Rattus sp.
cccagcacccgcgatcgcgcgggctctgtgctccgagggccgtgctcgcctggtgcctactccagggctgtgtacaccgcgcgggcggcggctgagcccgcaccaggagggcgcgggagccgcagggccctggagctttgggcgactgctacgcggccttggccgaggctcttccttgctcgccgttctgtcgcgggcctggcccgtgaaccgctcacagtatggcccgatgctgcttctacacggcggggacactgtctctgctgctgctggtgaccagtgtcacgctgctagtggctcgagtctttcagaaggcagtggaccagacgatcgagaagaatatggtattacaaaatggtaccaaggtctttgattcctgggagaagccccctctacctgtgtacatccagttttatttcttcaatgtcaccaatccagaggagatcctccaaggagaaatccccctgctagaagaagtggggccgtacacctacagggagctcaggaacaaggcaaacgttcagtttggagaaaatggaacaaccatatctgccgtcaccaataaggcatatatttttgaacgaaaccagtctgttggagaccctaccgttgacttgattagaacaataaatattcctctgttgactgttgtggaaatggcccagcagcccttcctcagggagatcatcgaggccatgctgaaagcttatcagcagacgctgtttgtcactcacactgtacatgaactgctctggggctacaaagatgaggtcttgtcgctcgtccatattttcagacctgacgtctcccctaactttggcctgttctatgagagaaatggaactaatgatggggagtatgtttttctgactggagaggacaattacctgaactttacaaaaattgtggagtggaatggaaaaacgtcgctggactggtggacgacggacacgtgcaatatgatcaacgggacagacggagattcttttcacccattaataagcaaggatgagaccctgtacatcttcccatctgacttctgcaggtccgtctatataactttcagtagctttgagaacgtagaaggactgcctgcttttcggtataaggtgcctgcagaaatactagccaattcctccgaaaacgctggcttctgtatacccgagggaaactgcatggacgcgggagtgctgaacgtcagcatttgcaagaatggtgcgcccattatcatgtctttcccacacttttaccaagccgacgagaagttcgtttcggccataaaaggcatgcgtccaaacaaggaagaacatgagtcatttgtggacattaatcctttgacaggaattattttaagaggggccaagagattccaaatcaacacgtacgttaagaagctggatgactttgtggaaacgggaaacattaggactatggttttcccagtgatgtatctcaatgagagtgttctcattgacaaagagactgcaagtcaactgaagtctgtgattaacacaactttgattgtcaccaacataccctacatcatcatggcactgggcgtgttctttggcttgattttcacgtggctggcgtgtcgaggacaggggtctacggatgagggaactgcagatgaaagggcacccctcatacggacctaatgggacttacctgttgcctgagcttggtgagagaatgtgagaactgacctgacctggaccaggacagggaaaagcctgcatcctcacgggctcctggcctgtcaagaagggagtgaagccgcagcactggcacgcgagaagaccctcctggacagaggggaccgagcaggtgacatggctggcaattacgctttataaaatcatgtctctgaaactgtgtcaatgtgtcttagggagtatttaataaattgtgtagaaaccttttgtgattgggctctgggagctgtggggttttgtaacccctgttgtagatacagtgtctgagtcacttgttaatgttaacttggcctgacccgattcagtatgcctcactctccaaactttgtgtttaaaatatgaaaaaaaa

SEQ ID NO: 121 - DNA, 970 bp, Rattus sp.
gcggtgtggttgagtagggtgctgctttcagtcgtgtggcctttggaactccgcgtagcactgccgcctcctcctgtcctcgccatgttcctcactcggtccgagtacgacaggggtgtgaacactttttctcctgaaggaagattatttcaagtggaatatgccattgagggccataagcttggttctacggccattggcatccagacatcagagggtgtatgtctagctgtggagaagagaattacctcgccactaatggagcctagcagcattgagaaaatcgtagagattgatgctcatataggttgtgccatgagtgggctaattgctgatgctaaaactttaattgataaagccagagtggagacacagaaccactggttcacctataatgagacaatgacagttgagagtgttacccaggctgtgtccaatctggctttgcagttcggagaagaagatgcagatccaggtgctatgtctcgtccctttggagtagcattgttgtttggaggagttgatgagaaagggccccaactgtttcacatggacccatctgggaccttcgtacagtgtgatgctcgagcaattggttctgcgtcagagggtgcccagagctccttgcaggaagtttaccacaagtctacgactctgaaggaggccatcaagtcttcactcatcatcctcaagcaagtcatggaggagaagctgaacgcaactaacatcgagctggccacagtgcagcctggtcagaatttccacatgttcacaaaggaagaactggaggaggtgatcaaggacatttaaggaggggccatcctcgaacttctgtgggacagtttcagttctaatggctcttagactttatttccaactccacgtcgtgaaaatatccagtatatgtatgtgtgtttttttatgatgtctgtacataacagcaattctgaaataaaaaaaatttacaaat

SEQ ID NO: 122 - DNA, 2721 bp, Rattus norvegicus (Norway rat)
gcggccgtcggcggacgcgggaagaagtgtcttgtaggcgcggcgccccactcagccccggcccccctcatccgcgtactcggctgatgcctcagggcgtcagctcggcggagaggcggtcgaggcgtgcgcctggctagcagttggctttccccgtgactcggacacgtttgcagtcgaataaacttgcgaccgccacgtgtggcatctctccaaggaaccggctcaggaggagggcgcgcccatcgtgggatcgcgcggggcgcccggcagggcggcggcgacagcggcagagccggccgcggctgctgcgtgcggaggcgctgccggttacgtaaagatgaggggctgaggtcgcctcggcgctcccgcgagtcgcaagctcccgcgcccccgccccctcggccgcgccgcaccgcgctcgtcgtccgagaccagggcagggctagccgaagctccgcagccaccctcaagtttggccgcaccgcccgggctgccgtcgcccgcaccatgtccgcggccgcctacatggacttcgtggctgcccagtgtctggtttccatctccaaccgcgccgctgtgccggagcacgggggcgctccggacgccgagcgactgcgactacctgagcgcgaggtgaccaaggaacacggtgacccgggggacacctggaaggattattgcacactggtcaccatcgccaagagcttgttggacctgaacaaataccgacccatccagaccccctcggtgtgcagcgacagtctggagagtcccgatgaggatataggatccgacagcgacgtgaccaccgaatctgggtcgagtccttcccacagcccggaggagagacaggattctggcagcgcgcccagcccgctctccctcctccactctggagtggcttcgaaggggaaacacgcctccgaaaagaggcacaagtgcccctacagtggctgtgggaaagtctatggaaaatcctcccatcttaaagcccattacagagtgcatacaggtgaacggcccttcccctgcacgtggccagactgccttaaaaagttctcgcgctcggacgagctgacccgccactaccggacccacactggcgagaagcagttccgctgtccgctgtgtgagaagagattcatgaggagtgaccacctcaccaagcatgcccggcgccacaccgacttccaccccagcatgatcaagagatcaaaaaaggctcttgccagccccttgtgaggtgctccccatatggcaaccaggcagagatggtcccggaaggacagagctcccaggaaacagacggacacatggaaatctgccaccgcagagttgtgctggccacaggaggtcactgctctttggtcaatattctgacactctccctgcgctgtttccaaaaagcacacggtagcctaagatcaaagtcaacatttggtccccttgcagaggccactctgaaccgtctctgactgttggagggcaggcaaataaatgcttttggtattttctcctttgttttggggggtggggggagggggcaaggccaagacttggggtaggatttttgaagattcaggctggtgtacatacgtctgactgggtgagttgacccctggcctcccacagtgactctggatccttgatgcttgctgactctcagaattgtttttcttctctctcaatgtcacgaccagagtgcttcagcttgtttagcagagccactctcgaatcacgttaacttttgagatttaaaaaacaaaacaaaacaacaaaaaaaaaaaaaaacccctccatagcacagctgtcttttatgcaagcaagagcacacctactccagcatgatctgtcatctaaggacttcaaaacaaaacaaaacaaaaaaaaaagttacttatagtcagtggataagcagagtccgaatttacactaaacaagacagaccttcgaggggtcataagtccggaactttcaaaccttgcttcgtatgaatcgtactatctgaacataaactgcacttttattttctaataccgagggtgaatacggtaaatccatgccttgagggtagaagccgacattctgtttggcacacgttattatctgcttattttccaggatacacatttccctgagaacccacggcagagatgtgagggcagaatgtatggaaacacatgctgaggaggggaaggaggaggggagtgctttaaagatacaaaaaaaaaaaaaaaaaaaaaaagagcaaacaattttaacttcatgaatttgtttgaattttcccaagcttcagataacaacgccactcacgggactaggacgctgcaagagcattgggctctgtgtagcattagctgataaatgggtgtatagccatcaccagacctggaaatgcccccttttggtgggggtgggggtgtttcttggtctctctttcgttcctatgaaatttccactaagaggtgcaagagttatatcaaaggaaagggaactgaaatatggaaaaaaaaaagtttgcccctgtaagtagtctctagggaaggaagatgccacaatggtttcagaggcgactctgcagaacagtcccttctgctgaacataggtcagagaaacactcgtgaatggcatcacatcgccaactgtctgcatcatggcccaccactacttagcttgtatctcggtgtctacacaatggcctgaaccactggtcaccat

SEQ ID NO: 123 - DNA, 481 bp, Rattus norvegicus (Norway rat)
  misc_feature (2005)..(2005): n
  misc_feature (3503)..(3503): n
caaccacgcccgcaacggagctgagcaacgccgaagataatggcaggctcggcgttggcggttcgggctcggctcggtgtctggggtatgagggtcctgcaaacccgaggcttcggctcggactcgtcggagagcatggattcgggcgctggctccatccgagaagctggtggggccttcgggaaacgagagaaggctgaagaggatcggtacttccgagagaagactagagagcagctggctgccttgaagaagcaccatgaagatgagattgaccaccattcgaaggagatagagcgtctgcaaaaacagatcgaacggcataagaagaagattaaatacctaaagaatagtgagcattgagtgcacacagtcagtctctcacagagtggccagtatcattccccacttctatagagattgttttgaatgattgatgtttgacctgtgtgctactaacagataataaattatcaccagg

SEQ ID NO: 124 - DNA, 2842 bp, Rattus sp.
tcgcggaaggtgacgtggacacggaagtggtcgtcgtcgcggcggcaccggtgggagcggggccctgcacttggagtgcggcgggcaagcggacgggtggcggaggcctctcagcggcggcggcggcgacttaaggcgcaggcgtggtccgttgggtgcgaatccgctgagcccacgagcggcctcttagccctctctcctgcccgtcggaaaccgggagcagggacccgcttagccggcgtcatcatgaccaagaccggtagcaagggcgggaacctccgcgacaagctggacggcaatgagctggacctgagtctcagcgacctgaatgaggtccccgtcaaggagctggctgcacttccaaaggccaccgtgttggatctgtcctgcaataaactgagcactcttccgtcggatttctgtggcctcacgcacctggtaaagctggacctcagcaagaacaagctgcagcagctgcccgcagactttggtcgcctggttaaccttcagcatttggatctcctcaacaacaggctggtcaccctgcctgtcagctttgctcagctcaagaatctgaagtggctggatctgaaggacaatcccttggatcctgtcctggccaaggtggcaggtgattgcttggatgagaagcaatgtaagcagtgtgcaaacaaggtgttacagcacatgaaggccgtgcaggcagatcaggaacgagagcggcagcgccggctggaagtggagcgagaggcagagaagaagcgtgaggccaagcagcaagctaaggaagcaaaggagcgcgagctgaggaagcgggagaaggcggaggagaaggagcgtcggcgaaaggagtatgatgctcagaaagcttccaagcgggagcaagagaagaagcctaagaaggaaacaaatcaggccccaaaatcgaagtctggctctcgccctcgcaagccaccaccccgaaaacacaatcgctcctgggctgtgctgaaggggttgttgctgctgctgctgctatgtgtagcaggagggctggttgtatgccgggtgacagggctgcaacagcagcccctctgcaccagcgtgaacgccatctacgacaatgccgtccagggcctgcgccatcatgagatcctccagtgggtcctccagaccgactcccagcagtgagctcatcctcagcaccgctgcctcccagcctcggagcttggattcctatggaattgggttctgctggacacaacttctttttagcgtcagacctacctgccatcatcaaatggctgctgagtggtacttgagatctcccctttgtaggacttctctgttccttagtcagggttccctggtggaatgaggagaaatggagaggggggaggaagagttacctgcatgcctaaaggaataggcttaggggtggggagagagaaggcataggcttttctagttatgcaaagctgtgtaaggcaaggttcctttctactaaatggtcagctgtcactacatttatacttttgtatgtcacaaaccctttctttcattcctccctgggtaaccaggacggattggagggcagtgtgttactgggactaggggactaggaatacttgggtaaattcagcctaagctgggagggtaaagtaatacatttccttaaagatctcagacagtcaagcattttagcaatgtccaaaatgtctggctatgaacacatgttcactgccattggtccagtgtaacactttgaggcaggaggtgccgtccatgacttacttgcctacagtgttcaagctagtccaaggcacaacccagctttcactccagttttcttcctttcctttatgtcatttggcctcctttataatactcaaggggatgaactcacaccagagttgtcttagctaaagtgaatctttcataatagacggtcttaccacccacaaatagatctcatcagggtcctgggaaactaatcctgtggaattttgcctcagcttaaatggcttccacaaaatggcagcaggctgggctccttgcctcccttttagagcattaaactccctgatggcctggaagcacaggggcagatctctgcagcggcactgtgactgccctactagcacttggtatgatgaaatacctcaaaggcaacctagaaacttgatctcacagaagcaggtgcagagttgcttctggacctgtaacagaagggaaggaatagaacagtgggagccaaagggaaacaaagtcacacggtggcgctgcaagtgatacataagtaaacattagcacaaaccagggcagcagcacccacctccctgctgctaccagaaagcattctccccgcttccctgtctcttcacaacagctgcaggaagggatcggaaacctgtctcggtgcttatttgctaaaactcccaactgcaagctctccctagaggagcaggacctgtcggagttcagacagtgtagccccagtggcccatgtgcttaggtcagccactcaagactgtcctgacacgggaagaaaggcctttgtttttccctcccccagatagttctgccgtgtaggtccacaccttactcagaatcactacacattcctttagtcttcctccaagctccagagccatcggtacaaatgctttattgagacaaaatacatactacatatggtgacatcatgaaaacagaagtcagcctcatagatccctggctggttgaggcagctcagtggctgggcgtagtcaagccaacccgcaggcaagagttcactctgacttcgagatttgatgcttattctttggatttctacaattattaaatccgtgtctgagtggtc

SEQ ID NO: 125 - DNA, 175 bp, Rattus norvegicus (rat)
agccatcggtacaaatgctttattgagacaaaatacatactacatatggtgacatcatgaaaacagaagtcagcctcatagatccctggctggttgaggcagctcagtggctgggcgtagtcaagccaacccgcaggcaagagttcactctgacttcgagatttgatgcttattc

SEQ ID NO: 126 - DNA, 1835 bp, Rattus norvegicus (Norway rat)
aagcttgagtgtgagagtcagggtgtgtgagttggcacatgtgtaagagtgtgagagtttatgagttctgtaagatgtgtgtgtgaatgtgagttctgtgagtgtgacctgtgtgtgagcgtgagcgtgagagggaggatgtggcggagtctccacacacacatatccatttgctgaaatgaccctgttcatcagccaagccagggacagcaaatgcagtctctgggccatagtggaccccatactctttttttttaatgtaaataaaatgcacacacacaagtatgcatgcacatatgcgtgaacacatacacacacaagcatgcatgtatatgggtgtgtgtgtgtgcacgcaacatacatattcttgataaagatatacctttactggaacaaaagattgcagttagagtgttaaaatattctccaagtagctgctttcttttctcttcctctccaactgctgaaattgaatggacagacttgtccaccagtataaaggcatatctgcaattaaccaacatataaaaaatgtcacattttgtctttgaaatctttttagaggatttatgtactgattttctgacttcaggcatgacttttttttttattaccagggaatttcatatatgcatgcaatgtgctttgctcaaacccacttctctctcacctctccttttcaatttcttcattatcccctctccacttttccattcccaacttcatgtgctcttttttgtttttcttcctagccagccagatatccagcatgaatggggcaggagctcgagaatcccacccatgtgaggagctactggtgactggggatgatagggagagacggtcagttctcttcaggcccctgagaggctagcccacgaggcagagggtagtcctacaccttgtatgtacaggcagcaccaaataaatgaagctgtgttggaacacagccacacccatcctgcctgctatggaaccccggggctcaggtgggtgattgcagtacatcagtcctacaaccctcaggcacttgctctctgactcttgaaactttcagacccccagctgggctgggaggggagccaggaagaggggtgtgatgctcttcatactgctgttctttgacaggacaccagaggctcccctccccctgtggaaggttcacacctccaactgtcctgtccaccctcacagaaggacaaacatcgatcagggtcaaattgacaataaaagggctggagcaagcaacagggactcaccaaccaggcctcgcctctgagttcagcccagagctagctgggaaatgttccggatgttggccaaggccagtgtgacgctgggctccagggcagcaagttgggtacggaacatgggctcgcaccagctgctggtgccacccccagaggccctgagcaagcccctgtcaattcctaagaggctcctgttgggtccgggaccctccaacctggctcctcgtgtgctagcagctggaagtctgaggatgattggccacatgcaaaaagagatgtttcaggtaggccttggtggcaggaggggtggtgatcactgggtagcaggcagaggagaggatctgacctgtgtgctcactgtctagatcatggatgagatcaagcagggcatccagtatgtgttccagaccaggaaccccctcacactggttgtcagcggctcaggacattgtgccatggagactgccctgttcaacctcctggagcctggggactcctttcttgtgggaaccaatggcatctgggggatacgggctgcagagatcgctgagcggattggtaagggagagtggtctgtgacctcgg

SEQ ID NO: 127 - DNA, 1570 bp, Rattus norvegicus (Norway rat)
gcggcggctgtatcccggacgttgttgccggtggccggacggcgcctgtggggatttacgcgaaggcttccgctccgcgccgccgctgctcagccattgtactttggaggggaccgactcagaagtacacaggctgctccacaagttgttctgaatgttcctgagacacaagtcacttgtttggaaaatggactcagggtagcttctgaaaactctgggatctcaacatgcaccgttgggctgtggatcgatgctggcagtcggtatgagaatgaaaagaacaatggcaccgctcactttctggagcacatggctttcaagggcactaaaaagaggtcccagttagaccttgaacttgagattgagaacatgggtgcccatctcaatgcctatacctccagagagcagactgtctactacgccaaagccttctccaaagatttgccaagagctgtagaaattcttgctgacataattcagaacagtacattgagagaggcagagattgaacgtgagcgtggagtcatcctcagagaaatgcaggaagttgagaccaacttgcaagaagttgtctttgattatctgcacgccacagcctatcaaaacaccgcgctcggacggacaattctgggaccaaccgagaacatcaaatctataagccgtaaggacttagtggactacataaccacacattataagggaccaagaatcgtgctggctgctgctggaggtgtttgccataacgaactgctggagttagcgaagtttcattttggtgactctttgtgcgcacacaaaggagatgtaccagctctgcctccctgtaaattcactggaagcgagattcgggtgagggatgacaagatgccactggcgcacctcgcagtggctattgaagcagttggttggacgcacccagacacgatctgtctcatggtcgcaaacacactgataggcaactgggaccgctctttcggaggaggaatgaatttatcgagcaagctggcccagctcacgtgccatggcaatctctgccacagcttccagtccttcaacacctcctacacagacacaggattgtgggggctctatatggtttgtgaacaagccacagttgctgacatgctgcacgctgtacaaaaggaatggatgcgtctgtgcacagctgttagtgagagtgaggtcgcacgcgccaaaaaccttctcaagacaaacatgctgctgcagcttgatgggtcaactccgatctgtgaagacatcggtaggcagatgctatgctacaacaggagaatccccatccctgagcttgaggccaggatcgatgctgtggacgcggagatggttcgagaagtgtgcaccaagtacatttatggcaaaagcccggccattgctgctctcggtcctattgagcgcttaccagattttaaccagatttgtagtaacatgcgctggactcgtgactgatttttgtgatgaattatcctacacatacatatttataaaactgagacctagaagttttgaaagactgctcatcttcaagtgaaaaaataaaaactttatttgaaac

SEQ ID NO: 128 - DNA, 2424 bp, Rattus sp.
ggctgactgacagcctttttttttttttttttaatatttaattggagatagggtctataacccaggctaccttgagctactttatgcagcttgggatgacctagaacttctgatcttcctacttcaatctcccgaaagctgaggttactggcatacacaccatgcttcgttagtagtctgtgttggcctagaacctgcgacaagccttttgcctcagctcccagagtactggaatgatcagcatacaaaaccatacctgatttagcacgtgacctaccttctgcccactattttgagacagggtctcactatctagtactggttggcccataactcactatgcaaactaagctgtcttagaactggcagatccgtctgtctctgcctcccaagggttgaaattgttttgaaacaggttcatctgcaacctagacctggaactcccagcaatcttcctgcctcggcctcccaaatgctgctgggatgacaggcctctcatgtcttcaccccagtacagaccttatgtgcttgcccctcagtacagctagtgctgattccctgaaaaatcacctcttcctgctactagtagctcaaccagagatagtcccgcccataggcgtgattgatgagtcacacccacctctcccaattggttctactcttccaggaggcggggacaaggcaggggcagcagacgccatccggaccagaaaaagccaggagagaccagaaggtgcctggtccctgagagtctggtccactaactccagggactgtgggacagaggaacaaacaagaaagaactcgaggcctcgctgagtggcgcgcttgctgagtgctgccacatcccgcaagctgagcaggtatcccaactctgttcctgcccggtagaccacccgaggtggtgagtgtggtcttgtcttccagattcgtaggacagaagctccaggaggaggacccgcccaacatggcatcggagagcgggaagctatggggtggccgatttgcaggctcggtcgaccccaccatggacaagttcaactcatctatcgcctatgaccggcatctgtggaatgtggacctgcagggaagcaaggcctacagcaggggcctggagaaggcagggcttctcaccaaagctgagatgcagcagatactgcaaggcctggacaaggtggctgaagagtgggcccaaggcatcttcaaattgtaccctaatgatgaagacatccacacggccaacgagcggcgcctgaaggaactcattggtgaagctgcagggaagttacacacaggcagaagtcgcaatgaccaggtggtcacggacctcaggctgtggatgaggcaaacctgctcaaaactctccaccttcctcaaggtgctcattgaagccatggtagaccgggcagaggcggagtgtgaagtcctcttccctgggtacacacacttgcagagagctcagcccatccgctggagccactggatcctgagtcacgccgttgcgctgacacgagatttagagagactgaaggaggtgcagaagcggatcaatgtcctgccactgggcagtggggccattgcaggcaaccctctgggtgtggaccgggagttcctctgtgcagaactgaactttggagccattacgctcaacagtatggatgccaccagcgagagagacttcgtggctgagttcctgttttgggcttctctgtgcatgacccatctcagcaggatggcagaagacctgattctctacggtaccaaggaattcaactttgtgcagctctccgatgcctacagcaccggaagcagcttgatgccccagaagaaaaacccagacagcttggagctgatccggagcaaggcgggccgagtgtttggacggtgcgcaggactcctgatgaccctcaagggacttccaagcacctacaacaaggacttacaggaagacaaggaggctgtgtttgaagtgtctgacaccatgacagctgtcctccaagtagccactggagtcatctctacactgcagattcatcgtgagaacatggcacaggcactcagccctgacatgctggctaccgaccttgcctactacctggtccgcaaagggatgccattccgccaggcccacgaggcctcagggaaagctgtggtcgtggcagagatgaaaggggtggctctcaaccagctgtcacttcaggagctgcagaccgtcagtcccctgttctcgagtgacgtgaatctcgtgtgggactacagccacagcgtggagcagtacacagccttgggtggcacagcacagtccagtgttgagtggcagatcagccaggtgcgggccctgctgcagatgtagcagccctagattccacccagtcaaacgtgcgccccaataaagtggagccctggagaggccgccataaaccc

SEQ ID NO: 129 - DNA, 3751 bp, Rattus rattus (black rat)
agaaagagagctacagactccgcgcgctccggaagaccgggtcgtagagctcgagacaactcccgccagcagcaagacacgggagacccaaccaggatgacaaccctccccaggccgcccgctccatggaacaccagctcctgtgctgcgaagtggagaccatccgccgcgcgtaccctgacaccaatctcctcaaccgaccgggtctgcgagccatgcttaagactgaggagacctgcgcgccctccgtttcttacttcaagtgcgtgcagagggagattgtgccatccatgcggaaaatcgtggccacctggatgctagaggtctgcgaggagcagaagtgcgaagaggaggtcttcccgctggccatgaactacctggaccgtttcttgtctctggagcccctgaagaagagccgcctgcagcttctgggggccacctgcatgttcgtggcctctaagatgaaggagaccattcccctgactgccgagaagttgtgcatctacactgacaactctatccgccccgaggagttgctgcaaatggaactgcttctggtgaacaagctcaaatggaacctggccgccatgactccccacgatttcatcgaacacttcctctccaaaatgccagaggcggatgagaacaagcagatcatccgcaaacatgcacagacctttgtggccctctgtgccacagatgtgaagttcatttccaacccaccctccatggtggctgctgggagtgtggtggccgcgatgcagggcctgaacctgggcagccccaacaacttcctctcctgctaccgcacaacgcactttctttccagagtcatcaagtgtgacccggactgcctccgtgcctgccaggaacagattgaagcccttctggagtcaagcctgcgccaggcccagcagaacatcgatcccaaggccaccgaggaggaaggggaagtggaggaagaagctggtctggcttgcacacccaccgacgtccgagatgtggacatctgagggcccaccgggcaggcgggagtcaccaagtagtggcatccgcgaagagaaaggagccagcccgggtgctcctgacgaggtcccccttggggatgtgttgttaccagaaggggaagttttgttctctttgttggttgtttttccttaatctttctcctttctatctgatttaagcaaaagagaaaaaaatacctgaaagctgtcttaaagagagagagagagatagaattcgcatcaccctgagtatagggagacgggggggtgcctacaaaaatagaattctgtaccccagtaatcaactagttttctattaatgtgcttgtctgttctaagaataggattaacacacaggaagtcttgagaaggatttttgattcttttatgtgtttaagaaaaaaaagcttaagaaacattgctttaaaaaaagaaggaaaaaaaatacagcaaaccattgttaaagtagaagggttttaggtagagaaatgtactctgctttggtgaaaaggcacagatttgggaaggtcctcaacctcactcccctgcttgttcagtgcctacagacctgttacctgatgatacctgtgctttatcccaggagtggggcagacctcttaaccttactgatggtcgattcgacctctagcgggctcgtgggtgtggcaacctccagggctcatgttatgggccctctgccccccacaacctgcaggttcacagagcgccagccagcacgcaggggtagggatgaaatagtgacataatatattctatttttggggaaccttcctgttttgggggttcctgtttagagagatgctggtttttggctggtggccctgcagcccactcaacatcaggttgaacccacagcttttcttttgtgtgtggtttgttttgttatgtttttccttctccatgttcccaaaaccattccatttcaaagcacttttggtcagctagctggaggcagtgttgctgggtgtgtgtgtgtgtgtgtgtgtgtgtgtgtgtgtgtgtgtgtgtcggtgggggagggggtctagtggaatggttggggatgtccacacactcaattctgatggctgcacagcaggtgtgtagggctggtagcatgaggtgcttgggaagttgtgttgggtcgagaagagaaagctctgttctcgtaccaccgggatcttcctgcaaagtcggagggatcttttggtgccagctggcgtttggaagtagggaccgtgatggcattacctggacaaggggattcaggacgactcttaagtctttcacacaggaggcttttaaacactaaaatctctaatttatacgtaaggctacagaagagtatttattgggaaggttgcccatgacccgtgtgactcaaagcaatgtgatcttcccttgattcaaacgcacaccttcttccctgctggcgaaggttttaggccattgtctgagagactggtcttttattggccaagtggggtgtcctccaaaaaaaccaaaccacaaagacggagatgtgggtctccttgactttcccaacccaattgcccccattggagagccatccaaacctgaggaaaattaggggaccccaaaagagtcttgagtctggcacattcttgccgccgctcccaagttagcaacagtaggtaatttgcacacctctggctctgtgcctttctgttcaggatgtgttggtgggaggtggagagcgggtggctggagaggggatgtgagagaagaagtatggagggtagggaccacacgggacagaccgcggctcctttcacagcgctgctaccaatgactcccaggatccccggcgttcggaaccagattcacgttgctttgtatctttcatgttgttttcgctgctattggagggtcagttttattttgttgttgttggtttgtttgtttttttttacaatgtcataaactgccatgttcaagttttaatttcctcgtagaagagtgtatttacagatgccctctccgggactttttctatttattgtgattcaattttggattaatgtgattaccgctgtattcccaacaaaaggtgttttccacacacacacacacacacacacacacacacacacacacacacaggttcctgtacacaatacctcatgtatcacctaacaatacataggcctgccaggcgggtggggcggtctgcctccagggaccctgggaccctgctggggatcatcctgtcatgctgggccttcatttgatctgggacatagcatcacagcagtcaggccaactgtgttctgttagttatcaatattgttacttgtagcggcctgttgtgcatgccaccatgctgctggacccggagagatttgttctgagtctctggtgcatcatataatctgttaggttctagtgttctgtcttgttttgtgttactcacagcattgtgctaatgtaaagccagccgcaatgctgtaggccccaggttccctagcaagctgccaaaccaaaagggtcaccaccagcttagctgaggcgtcccaaccaggcaggacccttgagggctgctgtgtccatggtgatggggtgaagttttggccaaagggccaaaggctggtggatccacacagtctgccctgtgacatgaatggctttgaggggctctggctggtggtcaggttggctttgtgtattctggttgacacaccatggcgcttcccagcacagacatgtgaccagcatggtccagg

SEQ ID NO: 130 - DNA, 840 bp, Rattus sp.
gccacttctggcactgggaaacgcttcctcagccacaccatggagcaaggaacggacttgcagtcacagattttcttccctacagaaaagaatttttggaaaaaaggcaaagaccacttcaggcaaaataagtacccattctcgagggaactttataacctgatttttgctgacagaaagggaaatgaggcgagttaccctttggaaatgtgctcacacttcgatgctgatgagattaaaaggctaggaaagagattcaagaagcttgacttggacaactctggttctttgagcgtggaggagttcatgtctctgcctgagttacaacagaaccctttagtacagcgggtcatagatatattcgacacagacgggaatggagaagtggacttcaaagaattcattgaaggagtctctcagttcagtgtcaaaggcgataaggaacagaagttgaggttcgctttccgtatctacgacatggataaagacggctatatttccaatggagagctcttccaggtgttgaagatgatggtgggcaacaacctgaaagatacgcagttacagcagattgtagacaaaaccataataaacgcagataaggacggggacgggagaatatcctttgaggagttctgtgctgttgtaggtggcctagatatccacaaaaagatggtggtggatgtgtgactctttgaagactctaccacccagcacttttgctttcttctccatctctgaagatctgctcaagacgtccagcagtgctctctgtgtgtgtaaatggaagtatttttctctgtgaagccacattttccaacatgagcctcataaaaaaaa

SEQ ID NO: 131 - DNA, 128 bp, Rattus norvegicus (Norway rat)
cctcttgtaccaggtccttgacaacctagacagccacctgaagaggtctgagtacttccgcttcctctggtttcctcacactgagaacgtcagcatcatctaccaagaccacaccaacaaggtaactg

SEQ ID NO: 132 - DNA, 1000 bp, Rattus norvegicus (Norway rat)
ctggaatcctaacagcatctacacaaagctatttataatgccagactatacttggtttgaaggaataccttttcatgcctttgggatttcaaaagaaactttgcaaaatgtttgtaataagtttgtggtgaaagaagaagatttgattttattggcttatcccaagtcaggaacgaactggctgattgaaattgtctgcttgattcagaccaagggagatcccaagtggatccaatctgtgactatctgggatcgctcaccctggatagagactgatgtaggatatgatatattaatcaaaaagaaaggaccacgactcatgacctcccatcttcccatgcatcttttctccaagtctctcttcagttccaaggccaaggtgatctatctcatcagaaatcccagagatgttcttgtttctggttattatttctggggtaattcaactcttgtgaagaagccagactcactgggaacttatgttgaatggttcctcaaaggaaatgttctatatggatcatggtttgagcacatccgtgcctggctgtccatgcgagaatgggacaacttcttgttactgtactatgaagacatgaaaaaggatacaatgggaaccataaagaagatatgtgacttcctggggaaaaaattagagccagatgagctggatttggtcctcaagtatagttccttccaagtcatgaaagaaaatgacatgtccaattatagcctcctgatgaaaaaatcaatttttactggaattggcctcatgaggaaaggcactattggggactggaagaatcacttcactgtatcccaagctgaagcctttgataaagtgtttcaggagaaaatggccggtttccctccagggatgttcccatgggaataaaatttcaaaagttttaaatattttatgaacattgatatttatgtttctgttgttctatgtctgaataactgaatgtggtcatcgaataaatcctgttctggtattgtg

SEQ ID NO: 133 - DNA, 828 bp, Rattus sp.
aattccgttgctgtcggaaagccagaaccggtttgtaggcagctcagtggagatcgggttcctattacagtgcaatcatgtctgttatgtcctataatggaggggccgtcatggccatgaagggaaagaactgtgtggccatcgctgcagacaggcgtttcggaatccaggcccaaatggtgaccacggacttccagaagatctttcccatgggtgacaggctctacataggcctggccggcctggccactgacgtccagacagttgcccagcgtctcaagttccgactgaacctgtacgagctgaaggaaggacggcagatcaagccttacaccctgatgagcatggtggccaacctcttgtatgagaaacggtttggtccctactacacagaacctgtcattgctggcttggacccgaagacctttaagcccttcatttgctctctggacctcattggctgtcccatggtgacagatgacttcgtagtcagtggcacctgctctgaacaaatgtatgggatgtgtgagtctctctgggagcccaacatggatccagagcacctgtttgagaccatttctcaggccatgctgaatgctgtggacagggatgccgtgtcgggcatgggcgtcattgtccacatcattgaaaaagacaagatcaccaccaggacactgaaggcgcggatggactaacctgtgctctggccccgtctcccttttgttgtttttctttttaataaaatctcctttctttcatgcctgcccgcccttgtttctgcgactttgtccccatcagggagagcccaatacagagcgactttatctc

SEQ ID NO: 134 - DNA, 1018 bp, Rattus norvegicus (Norway rat)
gctggaacgggtccgtacggcgttgttcttggttcccatcgtaacttaaaagggaaacttacacaatgtccggaggccttgacgtcctgcagatgaaggaggaggatgtcctcaaattccttgctgcaggaacccacttaggtggcaccaaccttgactttcagatggagcagtacatctacaaaaggaaaagtgacggtatctacatcatcaacctgaagaggacttgggagaagctgttgttagccgctcgagctattgttgccattgagaaccctgctgatgtcagcgtcatctcctccaggaacactggccagcgagctgtgctgaagtttgccgctgccacaggagccactccaattgctggccgcttcacacctgggaccttcactaaccagatccaagcagccttcagggagccccggcttctagtggtgactgatccccgggctgaccaccagcccctcacagaggcctcttacgtcaacctgcccaccattgctctttgtaacacagattctcccctgcgctatgtggacattgccatcccatgcaacaacaagggagctcactcagtgggtctcatgtggtggatgctggccagggaagtactccgcatgcgaggaaccatctcccgggagcacccatgggaggttatgcctgatctttacttctacagggacccagaggagattgagaaggaggagcaggctgccgctgagaaggctgtgaccaaggaggaattccagggtgaatggacggcaccagcgcctgagttcactgctgctcagcctgaggtggccgactggtctgagggtgtgcaggtgccctctgtgcccattcagcagttccccacagaagactggagtgcacagccggccactgaggactggtcagcagctcccacagcacaggctactgagtgggttggagccaccactgagtggtcctgagctcctctgcaggtgcctgagcgaagggaaaaaaggtggaaggaaaataaagttcctgaaagctg

SEQ ID NO: 135 - DNA, 514 bp, Rattus norvegicus (rat)
agaggcctcttacgtcaacctgcccaccattgctctttgtaacacagattctcccctgcgctatgtggacattgccatcccatgcaacaacaagggagctcactcagtgggtctcatgtggtggatgctggccagggaagtactccgcatgcgaggaaccatctcccgggagcacccatgggaggttatgcctgatctttacttctacagggacccagaggagattgagaaggaggagcaggctgccgctgagaaggctgtgaccaaggaggaattccagggtgaatggacggcaccagcgcctgagttcactgctgctcagcctgaggtggccgactggtctgagggtgtgcaggtgccctctgtgcccattcagcagttccccacagaagactggagtgcacagccggccactgaggactggtcagcagctcccacagcacaggctactgagtgggttggagccaccactgagtggtcctgagctcctctgcaggtgcctgagcgaagggaa

SEQ ID NO: 136 - DNA, 1604 bp, Rattus norvegicus (Norway rat)
cgagcggactctctagcccttgtgggtccctgttcagcgcccggccgtgtggagacccgggagccagtccgggcctccgaggcgaagatggtggactacagcgtttgggatcacatcgaggtgtcggacgatgaggacgagacgcaccccaacatagacacggccagcctgttccgctggcggcaccaggcccgggtggaacgcatggaacagtttcagaaggagaaagaagaactggaccggggctgccgggaatgcaagcgcaaggtagccgagttccagcgcaagctgaaggaactggaagtggctgagggtggtggccaggtggagcttgagcggcttcgagcggaggcacagcagctgcgcaaggaggagcgaactgggagcagaagctggaggacatgcggcaaaaaggagaagaacatgccctggaatgtggacacactcagcaaagatggcttcagcaagagcatggtcaataccaagcctgagaaggcagaggaagactcagaggaggcaagggagcagaaacacaagaccttcgttgaaaaatacgagaaacagatcaaacatttcggcatgctccaccgctgggatgacagccagaagtacctgtcagacaatgtccacctggtgtgcgaggagacagccaactacctggttatctggtgcattgacctggaagtcgaggagaagtgtgccctgatggagcaggtggctcaccagaccatggtcatgcagttcatcctggagttggccaagagtctgaaggtcgacccccgggcctgcttccggcagtttttcaccaagatcaagactgctgaccagcagtacatggagggcttcaagtatgaactggaggcctttaaggagcgtgtgcggggccgcgccaagctgcgaatagagaaggccatgaaggagtacgaggaggaggagcgcaagaagaggctaggccctggtggcctggaccctgtggaggtctacgaatctctgcctgaggagctgcagaagtgctttgatgtgaaggatgtacagatgctgcaagacgccatcagcaagatggatcctactgatgccaagtatcacatgcagcgttgcatcgattctggcctctgggtccccaactccaagtctggtgaggccaaggagggggaggaggcgggccccggggacccattgctggaagccgtccccaaagcgggcttcgagaaagacatcagtgcgtgacccttctccagaaaaggaaacccagccaccatgtccctagctcccgacttcttcacttctgctgctcctcacgtcctggcccatggcctgccccatgtcccctctcctccggcctgtccccagcactcatcagattctctgcttcgggttgaggggctctgctgtctgcagcccccccacccccatcagcgttatgccaaagtcctgggggtctggggaggggcagcagctgccaggttggtccaccgggttggggatacacatgtccccatctgggcagggtctgtccctatgggtctatggtcactgtttctcttctgtctagctttctgtcctgcaactggcaacaatgtccaataaacagttccaggtgctgg

SEQ ID NO: 137 - DNA, 1500 bp, Rattus norvegicus (Norway rat)
taaccgcgccaaccgccaccgaggtgcccggagagaggcggagaggcggcatgagcgaggcgggcgaggccaccaccggcggcaccacgcacccgcaggccgcggccgacgcgcccgccgcggcgcccccggaccccgcgcctaagagcccggcggccagcggcgcgccccaggccccggcgcccgccgcgctgctcgcgggagccccggcgagagccagcccccgggcccgccccggcctcatcagcccccgcgggaagcgaggacgcgagaagaaagttctcgccaccaaagtccttggcactgtcaaatggttcaacgtcagaaatggatatggatttataaaccgaaacgacaccaaagaagatgtgtttgtacaccagactgccatcaagaagaataaccacgtcaagtatctgcgcagtgtgggggatggagaaactgtagagtttgatgtggttgaaggagaaaagggtgctgaagcagcaaatgtgactggcccagatggagttcctgtagaagggagtcgctatgctgctgatcggcgccggtacagacgcggctactatggcaggcgccgaggacctccccgtaatgctggtgagattggagagatgaaggatggagtccccgagggagcgcagctccaggttcatcggaatcccacttaccgcccaaggttccgcaggggacctgctcgcccacgacctgcccctgctattggagaggctgaagataaagaaaatcagcaagcggccaatggtccaaaccagccgtctgcccgccgtggattccgacgcccctacaactacaggcgccgcccccgtcccctcaacgctgtttcacaagatggcaaagagaccaaggcaggtgaagcaccaactgagaaccccgctccagccaccgaacagagcagtgccgagtgaccctggctcccaggcaccttcaccaccagcagggtgaccttaagaattaatgaccattcaaaaacaaggcaaaaagcacacccacgaccttaccaacaccaaagaaacatctaagcaataaaacggaagactaacaagatttggacattagaatgtttactgctattctctacgaaactaacaactgcaaagggaaggagcccgcactgtccatcaagctgcgtcccgggaacctgcacaggcagagagcagcctccccatttcagcaacctagtgctttatatttttttcctggtttttactgttttggtaatatgaattaaaagaagaaatattaataccacatggggattgccccaaccaaagaaatctgaaatatatagtaaatgctctttttcctttgttgttcattttggatgctggtgctaaacttccaagtgtcatgatttaagaagaaattttatgcccttatttattcctaggatgaggggagaacatttttgctttcttacatagctctctctgaaatgtgcagtaacaagttcctcaaaaataaaatttttaccttcaaaga

SEQ ID NO: 138 - DNA, 3216 bp, Rattus norvegicus (Norway rat)
ggtacccaacagcctgaactcagagccccgagagcagagcattcagggcaagcagaaacaccctgcagaggctttccaagaatccctcggcatggcaagacaaggctgtctcgggtcattccaggtaatatccttgttcacttttgccatcagtgtcaatatctgcttaggattcacagcaagtcgaattaagagggcagaatgggatgaaggacctcccacagtgctgtctgactctccatggaccaacacctctggatcctgcaaaggtagatgctttgagcttcaagaggttggccctccagactgtcggtgtgacaacctgtgtaagagctacagcagctgctgccacgatttcgatgagctctgtttgaaaacagtccgaggctgggagtgcaccaaagacagaagtggggaagtacgaaacgaggaaaatgcctgtcactgcccagaagactgcttgtccaggggagactgctgtaccaactaccaagtggtctgcaaaggagaatcacactgggtagatgatgctgcgagaaatcaaagttccgaatgcctgcaggtttgtccgcctccgttaatcatcttctctgtggatggtttccgtgcatcatacatgaagaaaggcagcaaggttatgcccaacattgagaaactgcggtcctgtggcacccatgtcccctacacgaggcctgtgtaccccacaaaaaccttccctaatctatatacgctggccactggtttatatccggaatcccatggaattgtcggtaattcaatgtatgatcctgtctttgatgcttcgttccatctacgagggcgagagaagtttaatcataggtggtggggaggccaaccgctatggattacagccaccaagcaaggggtgagagctggaacattcttttggtctgtgagcatccctcatgaacggaggatcctaaccattcttcagtggctttctctgccagacaacgagaggccttcagtttatgccttctactcagagcagcctgatttttctggacacaagtacggcccttttggccctgagatgacaaatcctctgagggagattgacaagaccgtggggcagttaatggatggactgaaacaactcaggctgcatcgctgtgtgaacgttatctttgttggagaccatggaatggaagatgtgacatgtgacagaactgagttcttgagcaactatctgactaatgtggatgacattactttagtgcctggaactctgggaagaattcgagccaaatctatcaataattctaaatatgaccctaaaaccattattgctaacctcacgtgcaaaaaaccggatcagcactttaagccttacatgaaacagcaccttcccaaacggttgcactatgccaacaacagaagaattgaagacatccatttattggtcgatcgaagatggcatgttgcaaggaaacctttggacgtttataagaaaccatcaggaaaatgttttttccagggtgaccacggctttgataacaaggtcaatagcatgcagactgttttcgtaggttatggcccaacttttaagtacaggactaaagtgcctccatttgaaaacattgaactttacaatgttatgtgcgatctcctaggcttgaagcccgctcccaataatggaactcatggaagcttgaatcacctactgcgtacaaatacctttaggccaaccatgccagacgaagtcagccgacctaactacccagggattatgtaccttcagtccgagtttgacctgggctgcacctgtgacgataaggtagagccaaagaacaaattggaagaactcaataaacgtcttcataccaaaggatcaacagaagctgaaaccgggaaattcagaggcagcaaacatgaaaacaagaaaaaccttaatggaagtgttgaacctagaaaagagagacatctcctgtatggacggcctgcagtgctctatcggactagctatgatatcttataccatacggactttgaaagtggttatagtgaaatattcttaatgcctctctggacatcgtataccatttctaagcaggctgaggtctccagcatcccagaacacctgaccaactgtgttcgtcctgatgtccgtgtgtctccaggattcagtcagaactgtttagcttataaaaatgataaacagatgtcatatggattcctttttcctccctacctgagctcctccccagaagctaagtatgatgcattcctcgtaaccaacatggttccaatgtaccccgccttcaaacgtgtttgggcttatttccaaagggttttggtgaagaaatatgcttcagaaaggaatggagtcaacgtaataagtggaccgatttttgactacaattacgatggcctacgtgacactgaagatgaaattaaacagtatgtggaaggcagctctatacctgtccccacccactactacagcatcatcaccagctgcctggacttcactcagcctgcagacaagtgtgacggtcccctctctgtgtcttccttcatccttcctcaccgacccgacaatgatgagagctgtaatagctccgaggatgagtcgaagtgggtagaggaactcatgaagatgcacacagctcgggtgcgggacattgagcacctcactggtctggatttctaccggaagactagccgtagctattcggaaattctgaccctcaagacatacctgcatacatatgagagcgagatttaactttctgggcctgggcagtgtagtcttagcaactggtgtatatttttatattgtgtttgtatttattaatttgaaccaggacacaaacaaacaaagaaacaaacaaataaaaaaaaaaaccacttagtattttaatcctgtaccaaatctgacatattaagctgaatgactgtgctattttttttccttaattcttgatttagacagagttgtgttctgagcagagtttatagtgaacactgaggctcacaatccaagtagaagctacgtggatctacaaggtgctgcaggttgaaaatttgcattgaggaaatattagttttccagggcacagtcaccacgtgtagttctgttctgttttgaaagactgattttgtaaaggtgcattcatctgctgttaactttgacagacatatttatgccttatagaccaagcttaaatataataaatcacacattcagatttt

SEQ ID NO: 139 - DNA, 419 bp, Rattus norvegicus (rat)
gggcctgggcagtgtagtcttagcaactggtgtatatttttatattgtgtttgtatttattaatttgaaccaggacacaaacaaacaaagaaacaaacaaataaaaaaaaaaaccacttagtattttaatcctgtaccaaatctgacatattaagctgaatgactgtgctattttttttccttaattcttgatttagacagagttgtgttctgagcagagtttatagtgaacactgaggctcacaatccaagtagaagctacgtggatctacaaggtgctgcaggttgaaaatttgcattgaggaaatattagttttccagggcacagtcaccacgtgtagttctgttctgttttgaaagactgattttgtaaaggtgcattcatctgctgttaactttgacagacatatttatgcctt

SEQ ID NO: 140 - DNA, 2744 bp, Rattus norvegicus (Norway rat)
tgaggacagttcctttttccctccctagaggaaagaaagagccttattttctggctaaacaggtttacacagctacaggaacaatggattccaggctagctttagccacggaggagcccattaagaaagacagcctgaagagatataagatcctttgtgcggttcttcttgctttgctggtgatcgtgtcgcttggattgggcctgggcctgggactcaggaaacctgaagagcatataggcagctgcaggaaaaaatgctttgattcgtcacacagaggactggagggttgccgctgtgactccggatgcacagaccggggagactgctgctgggactttgaagatacctgtgtgaaatcaactcaaatctggacgtgtaattcgttccgctgtggggagaccagactagagacagccctctgttcctgtgcggatgactgtctgcagaggaaggactgctgcactgactacaaggctgtgtgccaaggagaagtcccatgggtgacagaagcctgtgcctcatcccaggagccccagtgtccagaagggtttgaccagccgccggttatcttgttctccatggacggctttagagctgagtacttacaaacatggagcaccctgctgccaaacattaacaaactgaaaacatgtggactccattccaaatatatgagagcagtgtatcccaccaaaacctttccaaatcattataccattgtcacgggtttgtatccagagtcgcacggcatcattgacaataacatgtatgatgtgtacctcaacaagaatttttcactttcttcagtggagaaaagtaaccctgcctggtggagtgggcagccgatttggttaacagcaatgtatcaaggcttaaaagctgcttcctactactggccaggatcagatgtggctgtcaatggctccttccctaacatctacaggaattacagcaattccgtcccatatgaaagtaggattgctacactgttgcaatggctggacctgcccaaagctgaacgacccagtttttacaccatatatgtggaagagcccgattctgcggggcacaagagtggaccagtcagtgctggagtcattaaagccttacagttagttgatgatgcctttgggatgttgatggagggtttgaaacagaggaatttacacaactgtgtcaacataatcgttctggctgatcatggaatggaccagacctcttgtgacagagtggaatacatgacagattattttcctgaaataaacttctacatgtaccaaggacctgcccctcgaatcaggactcgtaatatacctcaggacttctttacctttaattccgaagagattgtcagagacctcagctgtcgaaaatccgatcaacacttcaaaccctacttgactccggatttgccgaaacgactgcactatgccaagaacgtcaggattgacaaagttcatctaatggtggatcggcaatggctggcttacaggaacaaaggagttcccaactgcgaaggcgggacacacggttacaacaatgaatttaaaagtatggaggcaatctttttggcacatggacccagctttaaagagaagactgttatcgaaccatttgaaaacatcgaagtctataatctactgtgtgatcttctgcacatccaaccggcaccaaacaacggttctcacggtagcctgaatcatcttctgaaggcaccattttaccagccgtcgcatgcagaagaattgtcaaagtctgctggctgtggttttactactccattgcctaaggactcactaaactgctcctgcctcgcactgcagacttctggtcaagaagagcaagtcaaccaaagactaaatctcaatagaggagaggtctcggcaacagagaagacaaatttgccatttgggaggcccagggtgatacagaagaacaaagaccactgtctgctttaccacagggaatacgtcagtgggtttgggaaagctatgaagatgcccatgtggagttcatacactgttcccaagccgggagacacatcatctcttcctcccacagttccagactgtctgcgggctgatgtcagggttgatccttcggagagccaaaaatgttccttctatttagcagaccagaatatcgaccatggcttcctctatcctcccgcaatcaaaggaaataatgagagtcaatatgatgctttaattacaagtaatttggtcccaatgtataaagaattcaaaaaaatgtgggactacttccataaagttctccttataaaatacgctatagaaagaaatggagtgaatgtggttagtggacccatatttgattacaattatgatggccattttgatgcccccgatgaaatcacaaactatgtagctggcaccgatgttcctgtcccgacacactactttgtggtactgacaagctgtaaaaacaaaacccacacacccgacagctgccctgggtggctggatgtcctgccctttgtcgtccctcaccggcccaccaaacccgtggaaagctgtcctgaaaacaaagcagaagacctttgggttgaagagagatttaaagcacacatcgcccgggtccgtgatgtggagctcctcactggccttgacttttatcaggaaaaaacacagcccgtctctgaaattttgcagctgaagacatatttgcccacattcgaaaccattatttgaatagatgtgtaaagccatttgacaaaatga

SEQ ID NO: 141 - DNA, 2779 bp, Rattus norvegicus (Norway rat)
tgtaaaacttgattcccgttgagatctgttgattgtatttttgagcacatgaataaccacgtatcttcaacaccgtctaccatgaagctaaaacaaaccatccaccccatacttttatatttcatacattttataatatcactctatactattttaacatacatcccattttattttttgtgtgagtcaaaacaagagaaaccaaaccacattaaagcaaagcctgtcagttcaaaaccggactctgcatacaggtctgtcaacagtatggatggcttagcttcagtattgtatcctggctgcgacacacttgataaagtttttatgtatgcaaaaaacaaatttaaggacaaaagactattgggaacacgtgagattttgaatgaggaagatgaaatacaaccaaatggaaaggtttttaaaaaggttattctggggcactataattggctttcctatgaagatgtcttcattcgagccctcgattttggaaatgggttacaaatgttgggccagaagccgaaggccaacatcgccatcttttgtgagaccagggctgagtggatgattgctgcgcaggcgtgtttcatgtacaacttccagcttgttacactgtatgcgactctgggaggtccagccattgtccatggactgaatgagacagaggtgaccaacatcattactagtaaagaactcctgcaaacaaagctgaaggatatcgtctctttggtcccacgtctgcggcatatcattactgttgatgggaagcctccaacctggtctgagttccccaagggcgtcattgtacacaccatggctgcagtgcaggctctaggagtaaaggctgacgtggacaagaaagctcacagcaaaccactgccctcagatattgcagtaatcatgtacacaagtggatccacaggaattccaaagggagtcatgatctcacacagcaacatcattgcctctataacggggatggcgagaaggattccaagactgggagaggaagatgtatacattggatatttgcccctggcacatgttctagaattaagcgctgagcttgtgtgtctttctcatggatgccggattggctactcttcaccacagacattagcagatcagtcttcaaaaataaagaaaggaagcaaaggagacacatccgttctgaagcccacgctgatggcagctgtgccggaaatcatggatcggatctacaaaaatgtcatgaataaagtgaatgaaatgagtgcttttcaacgaaacttgtttattttggcatataattataagatggagcagatttcaaaagggtgtagtaccccgctgtgtgaccgctttgttttccggaatgtccgaaggctgctgggtggaaatattcgcgttttattgtgcggtggtgctccactttctgcaacgacacagcgattcatgaatatctgcttctgttgtcccgttggccaggggtatggactcacagaatctactggggctggaacaattacagaagtgtgggactacaataccggcagagtgggagcaccattagtttgctgtgaaatcaaattaaagaactgggaggaaggtggctattttaatactgacaaaccacatcccagaggtgaaattctgattggtggccaaaatgtgacaatggggtactacaaaaatgaagcaaaaacaaaggccgatttctttgaagatgaaaacggacagaggtggctgtgcactggcgatattggagagtttgaccctgatggctgcctcaagatcattgatcgtaaaaaggaccttgtgaaactacaggcaggagagtatgtttctctaggcaaagttgaggcagctttgaagaacctcccactgatagataacatttgtgcatatgcaaacagttaccattcttacgtaattggatttgttgtgccaaatcaaaaggaacttacggagctagctagaacgaaaggatttaacggaacttgggaagagctgtgtaacagcagtgaaatggaaaacgaggtccttaaagtgctttctgaggctgctatttcagcaagtctggaaaagtttgaaatcccactgaaaattcgtttgagccctgacccatggactcccgaaactggtctggtgactgatgccttcaagttgaaacgtaaagaacttaaaacacactaccaggcagacattgagcggatgtacggaagaaaataattagtttgggcattggtttgctacagtgagctcagatcaaatagggaaatacttgaaatgtatgtctcaggccaaggcaaactccattcctcatattaaaccctggctgttacttctcactacgtcaccatttttaactgacaggattagtaaactattaagacagcaaacatgtgtctgtctctgttttttcccctcctccagtttgctttggcatctatgactgtgtttgtcaataggagactttttcaaaatcatactggggaagcagtgattttaaaacctcaagtttttaaacatgatttatatgttctgtacaattgttcagtttgtaactttttaaagtttggatgtatagaaggataaataggaaatataaaaattggttatttgggggcttttttacttattgtatttaaaaataaaagggtatcaatgtgaaattatgtaaattttaaatgcttatgaatcaaatcattgttgaacaaaagatttgttgctgtgtaattattgtcttgtacgcatttaagagaaataaatatactcagacttatgttttaagaaatgg

SEQ ID NO: 142 - DNA, 900 bp, Rattus rattus (black rat)
tggagcggcggcggcttgagctcgcgcgtccgcagtgatgagctacgaccgcgccatcaccgtcttctcgcccgacggccacctcttccaagtggagtacgcgcaggaggcggtcaagaagggctccaccgcggttggtgttcgaggaagggacattgttgttcttggtgtggaaaagaagtcggtggccaagctacaagatgaaagaacggtccggaaaatctgtgctctggacgataatgtctgcatggcctttgcagttgtagcctctgtctcaggtctcactgccgatgcaaggatagtcatcaacagagccagggtagagtgccagagccaccggctgaccgtgggggacccagtgactgtggagtacatcacccgctacattgccagtctgaagcagcgttacacacagagcaatgggcgcaggccatttggtatctctgccctaattgtgggtttcgacttcgatggcacccccagactctatcagactgacccctcaggcacataccatgcttggaaggccaatgccataggccggggtgccaagtcggtgcgtgaatttctggagaagaactacacagatgatgccattgaaacagacgatctgaccatcaaactggtgatcaaggcgctgctggaagtggtccagtcaggtggcaaaaacattgaacttgctgtcatgaggcgggatcagcccctcaagattctaagtcctgaagaaattgagaagtatgttgctgaaatcgagaaggagaaagaagaaaatgaaaagaagaaacaaaagaaagcatcatgagggcagcggtcagagcagctttgagcctccatccgagcaaacgggtgctgtgggccttgtggccatttgtcggagtccaataaactactacgtttttt

SEQ ID NO: 143 - DNA, 144 bp, Rattus norvegicus (rat)
atgttgctgaaatcgagaaggagaaagaagaaaatgaaaagaagaaacaaaagaaagcatcatgagggcagcggtcagagcagctttgagcctccatccgagcaaacgggtgctgtgggccttgtggccatttgtcggagtcca

SEQ ID NO: 144 - DNA, 6125 bp, Rattus norvegicus (Norway rat)
aattcccagggactaaaccaccacccaaagagtacacatggacagacccatggctccacctgcatatgtagcagaggatggccttgttgagcatcagtgggagggaaaacccttggtcctgctaaggcttgatcccccagtgtcagggaatatcagggcggggaggcgggaagaggtgggggtaacacctcatagaaaaaggggcaagcagatgagatagggggtttattgatgggaaccaggaaaggagataacatttgaatgtaatgaataaaaaatatccaataaaaaaaggaaaaaaagaatgtatggtagaaacagtatcaactaatcagacccctcagaactcccagagactaagccacccaccaaagagcatatgatgggtggtccaagacccttggaacatatgaatcagaggactgccttgctgtgcctcagttggagagggtgcacctaatctgatgtgacttgatgcctcaggggaggggatgcagtaggggaagaggggaataccctctcagaggcaaagaggagggggaatgagatgaagaactgtggagagaggaaaccaagaggggagtaacatctggaatgtaaataaataaaattacttactaaataaataaattatttaattataatgaactatattttattaattacactaattgatgaagttagttataataataattattaaataacttaaataaagtagaagtaaatataaaaataaatgtaaggaaagaacaacaacaaaagaatgtgcaatagagcaaactgcacaccttacaacccagcaagcaaaggataacagcactggccagtgttccacaatccctttaaagatcattcctccaatgacctgaaaacttcaaacaggctcttacccctaaagagtcacaacatcccacggtaccaagcctttaacacatggactttttacaatattgaaaatcaaattataataccaaataatcctaaatataatattatgttatgagaccctgaacattgtttaaataatttagaacatgttatagttatttcaggaagcagcatacatgtttggagtaaggccagtcattctaacctgccttgtattaggtacaaggaggatctgtcccatatatatgcctgttagctaatttgacaggaaagttctacccattagctccattccttaaatctgattacaatttgatatatttgatacaggctgagggtaagcctaggaggttcataagtgtcttttaagggggacatttttacatatagaaggctgtcctcaatctcctgtctttctccttcagccttcagagtgctaggagtacagatggccaccacacttggcttatattgtgcattttattcaggctttatacttgtgctagtgaaatgagttagtacatgttcctcctattgaaccatatctctaaattgctaaagtgtgtgtgtgtgtgtgtgtgtgtgtgtgtgtgtgtgtgtgtgtgtgtgtatgcttgagatggggttgttaatgtagcctaactggccctcaaagtcaccgagctatttcaaattcaccaccctgtctcacaatctgaaatattggtatcataaatatgtgtcaccacaccaagcctttgggcagattttcatttgcattaatagatgacagtgccatcttaaagactacaagagactgctaattgagatgtataaattcccttgacttaaatactgaaatgatccttcataagaaggatgggctgcatgcatggtgagaatcttcagggactaagcttatggatttttttgtttcccgaaggtaccatggctgaggaaaccgccccagctgttctggagcggcaccaagggtccttgtactccctttttcctgatcacagtgtgaagaaatactttaaccaagtggatatctccaatggtttggattggtccctggaccataaaatcttctactacattgacagcctgtcctacactgtggatgcctttgactatgacctgccaacaggacagatttgtatgaacatctttattatttttcataataatatttttcttatttttgtatctccttaagccatgtgacaatgtcattatttgtagagtagaggacttcctgatataatgatgatggcacagacttcactaagctgccagtgaaactgtggtcctcaatacatctccagtgtcttatttgagactagggctgtatctgcactagacagtgcagataggccttgacttttcctctccatcactaaaaagggcctccctagagaatgaatcctgccttatcagacagtgccaaaagcaaatatgcaacagaatgtgataaaagagggagactgaaactttggttcctgagtcttatttgatcttagttactagaggcagtatcagggcaaatgaacaacctttgaaatggaaaaataacagaaaagtgcttccaggttggttcagttccatgaatgttctgtaaaatgagccatcactggaaacttcgaggaaagaaattatttagaagaatttagaaaggagaccttgaaactgtttgatgaaaagtgtcagacaggaagagcaaaaccaatcataaaaatgacttgaaaaaatcacaggatttatgtagatttaatcaagggcaaacttttccagtccagatgctttgctttgaactatgtagtgctcctttttatgactattcttacccaatttccttacacatggctttaacctttttccattatacttcaatctgattgctggaatgcccctgccttttgtagctggctgctcctctgcactgtttcctgaggagctgaggatcaaacaatttctttcttttttttttttttttggttctttttttcagagctggggaccgaacccagggccttgctcttcctaggcaagtgctctaccactactgagctaaatccccaaccaaacaatttctttatatgttcactgagatgcaattccagcactccctccctttggatggtcattgtttggatactatgaatcatcttcaaacaccctgtggattttagaatgcccttcctttaagaagcaagctctttcaatactttttcttgatttttgtagaaagtaagacaaagaatatgtctcccaaggttttttgcatgcattgttcatatagtaccatttagctgccttatagatgttagacttggtcaagtatcacttgggaacaagtgatctaatcccagactgacaaatgtctgagatgggttgccaagcctactgaggtgcactctatctatagactctatggtggctgatcctcaagactaatcctaacactgaagcagagattactttaagagtctgaagacaggggttggggatttagctcagtggtagagtgcttgcctagcaagtgcaaggccctgggttcggttctcagctccgaaaaaaagaaaagagtctgaagacagcttgggctacacaatgaatactacaaccttggatgtagtatcagctttatttggcttagtagtagaggagttgtctagcatacataaggttctgaattctatcctcagaactgcaaaaaagaaagaaagaaagaaaggaaggaaggaaggaaggaaggaagaagaaagaaggaagaagaaagaagaaaagggaaaagaaagcatttatatctttataaagacaaaagggagtgaatgtatcccaaatcatatatttaaaatcctttgctaagtgatcagtatttataaccagcttgagaacacactgtttgtcagcattgtgcgacccactgtttggtcatgttttggttttgtttttcaaccatagccaaccgcaggactgtttacaagatggaaaaagatgaacaaatcccagatggaatgtgcattgatgttgaggggaagctttgggtggcctgttacaatggaggaagagtaattcgcctagatcctgagacaggtatgctggtagcaaaatagaatgtcgcacccactccagaaaagaccagtgctagacaccattactaatactgttagagccatattaatggtcttaactgaatgattttggaaataaaagcaaaagctacaactccaaatttatagtcaaaacgtcttttcctgtggaaactcaattctcagaaaaggtacattaaaagttaaatactggataggagccagataatatggtagcttataaacctaagtgtaaggaaggtaaaactaaagggtggtgagtttcgggcaacctgggcgacatagtgatactaagccatgttgggttcagcctatattgactcccttcaaggaacctccgcagtctcttacaccatccctgtcatccatgaatggtccagatgcatagtatatgttggaaatttctagaactaaatatttaataatgtatttggtgacctagggaaaagactgcaaactgtgaagttgcctgttgataaaacaacttcatgctgctttggagggaaggattactctgaaatgtacgtgacatgtgccagggatgggatgagcgccgaaggtcttttgaggcagcctgatgctggtaacattttcaaggtgagatggtcttttttcctgtgtgtgtggaaggggtgcattatggcgggtattctgttaaaaataattgattggtgcttttgcaaacatcccaaacctatttccatttatcatgataagctagtctctctagacttaattttcagttttttcaaatatacattatataaagttcaagatggtgtgtcttacctatttccggtattttaaaatattttcatgtttcaatattatttgtaacatcatctgattgtattgatgtcgtaaagagatgtgtaggtttttaacaatttttgtgatagaacaaacactgatttaaaaaaaacatacacattacaagtttgaaaacacgtgtggaaatactggctttggtgatggacctctgtatctcagcccttgacaatctgaagcataaagatggtgagctcaagctatcttgagacatataacacaggtacttttcttttcaaaaaaaagaggtatagggctggagagatggctcagtgtgttaagagcactgactgctcttccagaggtcctgagttcaattcccagcaaccacatggtggctcacaaccatctgtaacgggatccaatgccctcttctggtttatctgaagacagtaataacagtgtactcataccaataaaatgaataaataaatcctttttgaaaaatagcaataccttcttggcagatgagaaatgatctaataagtgtctctattaatgtgcatccttgctcattggaccagaagtatgtgaatgactgcttgaaccattctgctccaataagcaagcatgcacactgatttacttagttattttataatttatcagtttcactccttttttttcaacagataacaggtcttggggtcaaaggaattgctccatattcctatgcagggtaaactgcagctcttccttgctgtcagaagaaaaagctttgaagacaactggagaattaagggagagaaatcaatgaactttcaatcttgtttttttaatgaggcagtgatattatagcatggttaaactgctttaatttacacttttgattgggtgctggggaataaacctaaagcatggcatattaatgaagaacatatggtaaccatgaactccatctctggattcctttatttacaattttttaaaggttgaatattcgcaccagagaatgacaagtggttttgacaacatactctaggccttctattaaaaacaatctgtagaaaaggagctcaactatcaatcatcctgatcaattgctctggggcttgaaatgagacaatttccattctttttttttgcattccatacttgctgtacataaggcttccaaaaaatcaacgcatagaaacttagttgtaatttataatgattgtgtgacttttcatgtgttattttacaaactaaaatattaccagatgttattcaaacactggagcacaaactgtggttttaactgccacctagtggcctatacaaataaatgcatcacattacaaagaattttctttccatccttttactttt

SEQ ID NO: 145 - DNA, 3455 bp, Rattus norvegicus (Norway rat)
cgggcgcggacctgaggtgctgctgccgggtggtccttcctgtgttgtccgcgccctggaccatggcggcgctggcgggtgaagaggcctggaggtgtcggggctgtggcaactatgttcccctgagccagaggctgtacaggacagccaacgaggcctggcatagctcctgcttccggtgttccgagtgccaggagtccctcaccaactggtactatgagaaggacgggaagctctactgccacaaggactactgggccaagtttggagaattctgccacgggtgctccctgctgatgacagggccagccatggtggctggggagtttaagtaccacccagagtgctttgcctgcatgagttgcaaggtgatcatcgaggatggggatgcgtacgccctggtgcagcatgctacactctactgcgggaagtgccacaatgaggtggtgctggcacccatgtttgaaagactgtctacggagtctgtccaggaccagctgccctactctgtcacgctcatctccatgcctgccaccaccgagtgcagacgtggcttctctgtgtctgtggaaagcgcctcctctaactatgccaccaccgtgcaagtgaaagaggtcaaccggatgcacatcagccccaacaaccgaaatgccatccaccccggggaccgcatcttggagatcaatgggacccctgtccgcactctccgagtagaagaggtggaggatgcgattaaccagacgagccagacacttcaactgctgattgaacatgaccctgtcccccagcgcctggaccagttacggctagacacccggctttctccccacatgcagagtagtggacatactctcatgctcagcaccttggacgccaaggaaaatcaggagggaacactgaggagacgttctctgaggcgcagtaacagcatctccaagtctcctggccccagctcccccaaggagccgctgctcctgagccgagacatcagtcgctcagagtcccttcgctgctccagcagctactcacagcagatcttccggccctgtgacctgatccacggggaggtcctggggaagggcttcttcggacaggccatcaaggtgactcacaaagccacaggcaaagtgatggtcatgaaggagttaattcgctgtgatgaggaaacccagaagactttcctgactgaggtgaaagtgatgcgaagcctggaccaccctaacgtgcttaagttcatcggggtcctgtacaaggacaagaagctgaatctgctgacagagtacattgaggggggcaccctgaaggactttctgcgcaatgtggacccgtttccctggcaacagaaggtcaggtttgccaaaggcatcgcttccggaatggcttatttacactccatgtgcatcatccaccgagatctgaactcgcacaactgtctcatcaaattggacaagacggtggtggtagcagacttcgggctgtcacgtctcatagtggaagagaggaaaaggcctccagtagagaaggccgccaccaagaaacgcaccttacgcaagagtgatcgcaagaagcgctacactgtggtgggaaacccctactggatggcccctgagatgctgaatggcaagagctacgatgagactgtggatgtcttctcttttgggattgttctctgtgagatcattgggcaggtatatgctgatcccgactgccttccccgcacactggacttcggcctcaacgtaaagcttttctgggagaagtttgtcccaacagactgtcccccagccttcttccccctggctgctatctgctgcaaactggagcctgagagcagaccggcattctcaaagctggaggactcattcgaggcgctctccctgttcttgggagagttggccatcccactgccagcagagctggaagagctggaccacactgtgagcatggagtatggcctaacccgggactcgccaccctagccctggtccatccccctgcagggggacattccacagccagcattgccccctctgcgccctgtcctcgctgtgagcgagcaagcgggactgcctaggcttcctgtggattgacggcttgcttagaagcagaacaagccatccctacctccccaggaggcacttgggtgcagggaagcaattctccacaggtttgggcctagtttctgtctgtaaatccaacactcacctgaaagctgtgaagaggataaaagcctggattctagaccaagagtctgttactggggaccgcccgggacctctggactgagatgccgggagcctgtagctttacactaacctacacggcctgggcccgccgggccggatgagtggactggcctgagggcctctggttcagcaaggtgcaggacttgaagcgatagtatgagtttcagaaacggggccgtcaaaacgtgtgaaatgacagagcggtttctccttccatcctagccatgccctttggagcaggttttgaagagtcttagtagtggtaaaacctacaggatccaaaaaaaaaggactggtttctgctcagcagcccagggaccacatcagtgtgtggggaatttccacttcagcaccctgtctcaacaagcagtctcaaaaacaccaaagaaggtggggctggaaagaaagcggccctgccgtctaaaagccccacacccaggctggtgggctcagtcagaaacttaaggtgttgcctaacaatagatgggttctggatgccagtgtggtttgcctcagactttgggcctaagcagggagaagggggtcccattaatttctttgcacccttgtggcagctactgcataccctctaggatgtctggtccaggcagcaacttgggacaggcattggtggctgctgagtcccaaactgagatatgaagagagctccctgagctggaccttgtagagtctacctctgttgtgctggtccagcttacttcctgagacacactcgagggccgtgggcatgggaaactctaggggcactttccacccctggctaccaggtgtccagggactccgtagctcaccaaggttcgccatctcctaagtgggagctcacatcatatttaacacattgggaatgggtttggttataaatacgtgtgagggtttgtgctggtggggggatccggggagagtggctgctcttattagcttttatctgtggggtgatatgtgaaatattttgtacatagacaagatgaattatgggatgggaagtctttggccactttacttgctgtgtagactgtacttgtgtgtggagtttgcaaacgtgccgcagagggaatcctgaactcccgacatcagtgtggttcagcgtcctgcggcgaattatgcacgcgctgtccccagcgagtgtgggagtggtgggcctgcactgggccatgaggcagactaaataaattaagcagttaacagagc

SEQ ID NO: 146 - DNA, 855 bp, Rattus norvegicus (Norway rat)
atggcttgccttcttcctgctgctcgacttcctgcaggctttctcttcttagtgctctggggctcagttctaggtgacaagctgctggtggtcccccaggatggcagccactggcttagcatgaaggagatagtggagcacctcagtgaacgcggacacgacattgtggtgctagtgccagaagtcaatttgcttttgggagaatccaaatactacaggaggaaaagcttcccggtcccctacaacctagaagagttgcggacccgctatcgctcctttgggaacaaccactttgctgccagttcccccctgatggctcctctaagagagtacaggaacaacatgattgtcattgacatgtgctttttcagctgccagagcctcctgaaggactcggccaccctcagcttcctcagggagaaccagtttgatgctctgttcacagacccggccatgccctgtggtgtgatcctggctgagtatctcaagctgccttccgtctacctcttcagaggtttcccatgctctctggagcacatgcttggtcaaagcccaagccccgtatcctatgttcccagattctacaccaaattctcagaccacatgacatttccccaacggctggccaacttcattgctaacatcttggagaactacctttatcattgtctgtactcaaagtatgagatccttgcctacgacctcctcaagagagatgtgtccctacctgccttacaccagaactctctgtggctgttacggtatgattttgtgttcgaatacccccggccagtcatgcccaacatgatcttcattggagggaccaactgcaagaagaaggggaacctgtctcag

SEQ ID NO: 147 - DNA, 858 bp, Rattus norvegicus (Norway rat)
atggctcctgcagacgttccagcctctcttcctctcggtctgtgcctgctgctggcctctggctttgggcatgcaggcaagctgctggtggtgcccatggatggcagccactggttcaccatgcagatggttgtggagaagctccttcccaaaggccatgaggtggtggtggttgttccagaggtcagttggcagctgggaaaaccactgaattttacggtgaaaacgtattcagtttctcacactcaggaggatttaaatcgggagttcaagttttttattgactctcagtggaaaactcaacaagagagcggagttcttcctctactgactagccctgcccagggtttcttcgaattactgttttcacactgtaggagtttgtttaaggacaagaagttagtggagtacttgaagcagagttcgtttgatgctgtgtttctggatccttttgatgtgtgtggcttaactgttgccaagtacttttctctcccgtcagtggtcttcagcagggggatattttgtcactatcttgaagaaggctcccagtgccccagtcctccttcatatgtccccagacctatcttgaaactcacagataccatgactttcaaggaaagagtgtggaaccttctttcctacatgggggagcatgcattctgtcccagttttttcaaaactgctaccgacattgcctctgaagttctccagaccccggtgactatgacagacctcttcagcccagtgtccgtttggttgttacgcacagacttcacgttggaattacccagacctgtgatgcccaatgtgatccacattggagggatcaactgccaccaaaggaagccagtttccaag

SEQ ID NO: 148 - DNA, 1987 bp, Rattus norvegicus (Norway rat)
tgcaagactgtcagctgggaaggaaacttggaggcctgaactgctgaaggagagctaagatggagatcattcccaacctttctatagagacctgggtgcttctagctactagcttgatgctcttctacatatatgggacctattctcatggcctgtttaagaaactaggaattcctggacccaaacctgtgcctttatttggcaccattttcaactacggtgatggcatgtggaaatttgatgatgactgctataaaaagtatggaaaaatatgggggttttatgagggcccacagccttttttggctatcatggatccagagatcatcaaaatggtgctggtgaaagaatgttactcagtcttcacaaaccgtcggtgttttgggccaatgggatttatgaaaaaggccattaccatgtctgaggatgaagaatggaagagacttcgaacaatcctgtctccaaccttcaccagtggcaaactcaaggagatgttccccctcatgagacagtatggagatacattgttgaagaacttgaggcgagaagaagcaaaaggggagcccatcaacatgaaagacatctttggagcttatagcatggacgtgatcactggcacatcatttggagtgaacgtcgattccctcaacaatccacaggatcccttcgtgcagaaagccaagaagatcttaaaatttcaaatttttgatccatttcttctctctgtagttctgtttccatttcttactccaatatatgagatgttaaatttttcaatttttccaagacagtcaatgaactttttcaaaaaattcgtaaaaacaatgaagaaaaatcgccttgattcaaaccagaagaaccgagtggattttcttcaactgatgatgaatactcagaactccaaaggccaagagtcccagaaagctctttctgatctagaaatggcagcacaagctattattttcatttttgggggttatgatgccacaagcacctccatttccttcataatgtatgaactggccactcgccccaatgtgcaaaagaaactccagaatgagattgatagagctctgcccaataaggcacctgtcacctatgatgctctgatggaaatggagtacctggacatggtggtgaatgaaagtctaagattgtacccaattgctaccaggctagacagagtctcaaaaaaggatgtggaaatcaatggagtttttattcccaaagggactgtagttacgataccaatctatcctcttcatcggaaccctgagtactggctagagcctgaggaattcaaccctgaaaggttcagcaaggagaacaagggcagcattgatccttatgtatatctgccctttggaaatggacccaggaactgcattggcatgaggtttgctctcatcagcatgaaacttgctgtcataggagtcctgcagaacttcaatatccagccttgtgagaagacacagatccctctgaagatcagtaggcaaccaattttccaaccagaaggacccatcatcctaaagcttgtgtcaagagattaaacccagatttggacagtgaatttccctcaggaaccatgttataatcttcaaggagactgtttcacagaacaccagagaatttaattaacattagaataagagcaatataatataggcttcatcaattttcctcgattactgagtattcagaaattcactgaacaggctcagtggctctgcggtgtatcatctattttatgattcaaagaaaattattaactcaatggtagatgtggaggttcattatatgattcttgtggaccatctatacagattccagttagttccatcagttctgtattctaactgcagtagctgtttcttagagttctcatcaatagaaactgttgtattgacagttagtaaatgtgtagcaaattttctctttgtaaaaatatatgatattaagaatataaataaatatatctttcaag

SEQ ID NO: 149 - DNA, 2355 bp, Rattus norvegicus (Norway rat)
gctcttttcttctccctcgctatccgctcccccgcccccgtgcctctggctctgcgcctggctccctcgggtccgctcccctttcccgccggcctggcccggcgtcacgctcccggagtctccccgctcggcggcgtctcattgtgggagggggtcagatcaccccgccgggcggtggcgctggggggcagcggagggggaggggccttagtcgttcgcccgcgccgcccgcccgcctgccgagcgcgctcaccgccgatctccctccttgctctgcagccgcggcccatggagcccgccggcccggcccctggccgcctagggccgctgctgttctgcctgctgctctccgcgtcctgtttctgtgcaggagccagcgggaaagaactgaaggtgactcaggctgacaaatcagtgtctgttgctgctggagattcggccactctgaactgcactgtgtcctccctgacgcctgtgggacccattaagtggttcaaaggagaagggcaaaatcggagcccgatctacagtttcataggaggagaacactttcctcgaattacaaatgtttcagatgctactaagagaaacaatatggactttagcatctgtatcagtaatgtcaccccagaagatgctggcacctactactgtgtgaagttccagaaaggaatagtagagcctgacacagaaattaaatctggagggggaacaacgctctatgtactcgccaaaccttcttcaccggaagtatcgggcccagactccagggcctctcctggacagacagtgaacttcacctgcaagtcttacggcttctctccccggaatatcaccctgaagtggctcaaagatgggaaagaactctcccatttggagaccaccatctccagtaaaagcaatgtctcctacaacatctccagcacagtcagcgtgaaactaagccccgaggacattcattctcgggtcatctgcgaggtagcccacgtcaccttggaaggacgcccgcttaatgggaccgctaacttttctaacatcatccgagtttcacccaccttgaagatcacccaacagcccctgacgcccgcgagccaggtgaacctcacctgccaggtgcagaagttctaccccaaggctctccagctgaactggctggagaatggaaacttatcacggacggacaagcccgagcatttcacagacaacagggatgggacctataattacacaagcctgttcctggtgaactcatctgctcacagagaggatgtggtattcacgtgccaggtggagcatgacagtcagccagcgatcaccgaaaaccataccgtgcgggcatttgcccactcgagtagtggaggcagcatggaaaccatccctgataataatgcttactacaactggaacgtcttcatcggtgtgggtgtggcgtgtgctttgctagtagtcctgctgatggctgccctctacctcctccgaatcaaacagaagaaagccaagggctcaacttcttccacacggttgcacgagcccgagaagaatgccagggaaataacccagatccaggacacaaatgacatcaacgacatcacatacgcagacctgaatctgcccaaagagaagaagcccgccccccgggtccccgagcccaacaaccacacagaatatgcaagcattgagacaggcaaactgcctaggccagaggataccctcacctatgctgacctggacatggtccacctcaaccgggcacagccaacccccaagcctgagccatccttctcagagtatgccagtgtccaagtccagaggaagtgaatggggctgtggttggctctaggccccatccccacaagttttcttgtcctacatggagtggccatgatgaggacaaccagccagccagccctgtctccagaaggccaggtggcacaggtcctaggaccaggggtaagggtggcttctgtcttccctccgtggctctccaacacctcttgacacccatgtccccttcttctggagctgggtgttgcagaaccagagggggaactggagaaagctgcctagaatccaagaagcgttgtgcctcagcccatcacactgggtctggatcctggtcttggcaacccccaggttgcttccttgatgctccagcgcctggtcttctgtgtggagaagagttcaccatctccatccaacttgagcttcggggccagactccctttagatcagaccgccccatgtgtggaagaactacaccaggagtcaacaagttttcagccaacagtgctagcctccccacctcccaggctgacgagccctgaggagaaggaaccctcttcccctagaccagct

SEQ ID NO: 150 - DNA, 1879 bp, Rattus norvegicus (Norway rat)
aagactttttccccagccttaactggatagtctgaagttttcaaaactcttatccacaaagttgtcagaaccttgattgggaagtcctgtgcatctgtgctaacctacagggcctccttatccagagcactctgcatttcagagggtcgctgtcgaactacggttttggcgaagacattcctgaagaattgtctgaggtttcctctgcaaaaatggccaagctgacagctgttcctctcagtgcacttgttgatgagcctgtgcatatccgggtcacaggcctgacccccttccaggtggtgtgccttcaggcatcactgaaagatgataagggaaacctgtttaattctcaggccttctacagggccagtgaagtgggtgaggtagatctggaacgtgattcctctcttggaggagactacatgggggtccaccccatgggtcttttctggtccatgaaacctgaaaagctattgactagattggtaaaaagagatgtgatgaataggccccacaaagtccacataaaactttgccatccatactttccagtagaaggcaaagttatcagttcctccttggatagtctgattctggaaaggtggtatatggcacctggtgtcactaggatccatgtaaaggaaggccgaatccggggagccctgtttctgcctccaggagaaggtcctttcccaggggtcattgacttgtttggaggagctggtggactgtttgagttccgggccagcctcctggccagtcatggctttgccactttagctctggcttactggggctatgatgacctgccctctcgactggagaaggtagatctagagtattttgaagaaggtgtagagtttctcctgagacatcctaaggtcctgggcccaggggttggcatcctttctgtgtgcattggagcagagattggactttctatggctattaacctaaaacagataacagccactgtacttataaatgggcctaattttgtttctagcaatccacatgtatatcgtggtaaggtcttccagcctacaccctgcagtgaagaatttgtaaccaccaatgctttgggacttgtagagttctatcgaacctttgaggaaactgcagataaggatagcaaatactgttttcccattgaaaaagctcacggacattttcttttcgtggtgggagaagatgataagaacctcaacagcaaagtgcatgctaagcaagccatagcccagctgatgaaaagtggaaagaagaactggactctgctgtcttaccctggggcaggtcacctgattgagcctccctactccccactgtgctcagcctcaaggatgccctttgtaatcccaagcatcaactggggaggagaggttatcccacacgcagctgcgcaggaacattcttggaaggagatacagaaatttctcaagcagcatcttaatccaggtttcaacagtcagctgtgagtggacttgattatattactggaaagaggagctgggcatctcctggccagctccactcctcacttccatagaggaatgtctttaatctcttatcacatgaggaagaagagtaccaccagaaaatgccgaaggacagagagtgataacctcatgactttggaaggggagacatgttttccatggaataaaatgtccctcagtgagagtcctatatctgtataaataaaatcttagggttttcctaaaatgttcaacaccacagcaactttctgtgatgataattatcaaggaaattatcactgataatccacaggatactttagtttataaaagagacatgaaaagaattatatattgttacttattaatttcttaaaactcacattaaatatgcttagatcatc

SEQ ID NO: 151 - DNA, 846 bp, Rattus rattus (black rat)
cgttgctgtcgggcgctggccagcgtgttgcagcggccgatgccggtgaatcagcacgggttttttggactcggaggtcgtgcagatctgctggacttgggtccggggagtcctggtgatgggctgagcctagccgcgccgagctggggtgtcccggaggagccacgaatcgaaatgcttcatggaaccaccaccctggccttcaagtttcagcatggagtcattgttgcagcggattcccgggccaccgcaggtccctacattgcttcccagacagtgaagaaagtgatagagatcaacccttaccttctgggcaccatggctgggggtgcagcggattgcagcttctgggagcggttgttggctcgacagtgtcgaatctatgagcttcgcaacaaggaacgcatctcggtcgcggcggcctccaaactgcttgccaacatggtgtatcagtacaaaggcatggggctgtccatgggcaccatgatctgtggctgggataagagaggcccgggcctctactatgtagacagtgaggggaacaggatctctggaaccgccttctcagtgggatctggctccgtgtatgcgtttggagtcatggatcgaggctactcctatgacctacaagtggaggaggcctatgacctggcccgccgagccatctaccaagccacctacagagatgcctactccggaggagcagtcaacctctaccatgtgcgggaggatggctggatccgtgtctccagtgacaatgtagctgacttacatgacaagtatacttcatctatcccctgagggaaggtggagtgccctggttataataaataatagtacccgttc

SEQ ID NO: 152 - DNA, 1403 bp, Rattus norvegicus (Norway rat)
gggcttgcggcttctaaaatgccggattacctaggtgcagaccagcggaaaaccaaagaggatgagaaggacgacaagcccatccgagctctggatgaaggggatatcgccttgttgaaaacttatggccagagtacttattcgaggcagatcaagcaggttgaagatgacattcagcaacttcttaaaaaaattaatgagctcactggtatcaaagagtccgacactgggctggcccctccagccctctgggatttggctgcagacaaacagacacttcagagtgaacagccgctacaggttgcaagatgtaccaagataatcaacgccgattcagaggacccgaaatacatcatcaacgtgaagcagtttgccaagttcgtggtggatctcagtgatcaggtggcacctactgacattgaggaagggatgagagtcggcgtggacagaaataaataccaaattcacattccactgcctcctaagattgacccaacagttaccatgatgcaggtggaggaaaaacctgatgtcacatacagtgacgttggtggctgtaaggaacagattgagaaattgcgggaagtggttgaaacccctctactccatccagagaggtttgttaaccttggaatcgagcctccgaagggtgtgttgttatttgggccaccaggcacaggcaagaccctctgtgccagggcagtggccaatcggactgatgcttgcttcatcccagttatcgggtctgagcttgtacagaagtacgtcggtgagggggctcgaatggttcgggagctttttgaaatggccaggacaaaaaaagcctgccttattttctttgatgaaattgatgccattggaggggctcggtttgacgatggcgctgggggtgacaatgaggtgcagaggaccatgttggagctcatcaatcagctggatggctttgatcctcggggcaacatcaaagtgctcatggccactaaccgacctgatactctggacccagcgctgatgaggccagggaggctggacagaaagattgagttcagcttacctgacttagagggtcgaacgcacatctttaagattcatgctcgctcaatgagtgtggaaagagacatccgatttgagctactagcccgcctgtgtccaaacagtactggagcggagattagaagcgtttgcacagaggctggtatgtttgcaatccgagcccggagaaagattgctacagagaaggacttcttagaagctgtaaataaggtcatcaagtcgtatgccaaatttagtgctactccccgctacatgacatacaactgagccacagaggctttgactgaaggaacttcctgtgcgttcataacttgttaccgcctcacaaaaataaaagacttaaaaactgt

SEQ ID NO: 153 - DNA, 2091 bp, Rattus norvegicus (Norway rat)
attttcaagggccagcgagagagggagtttggcacagtttgtggagaactcaaagaaaaaccaactctgttcgcagtccccagctcctccagccatggcaccacaagaacgacttctcatccgcgggggtcgcgtggtcaatgatgacttctcacaggtggccgacgtgctagtggaggacggcgtggtgcgggcgctgggacgggacttgctgcctcccggggacacatcccgggggctgcggatcctagatgcagcgggcaagctcgtcctgccgggaggcatcgacacacacacgcacatgcagttcccgttcatgggctcgcagtcagtcgacgacttccaccagggcaccaaggctgctttggcaggaggcaccaccatgatcattgattttgcgattcctcagaaaggcagctccctcattgaagcttttgagacctggcgcaactgggcagaccccaaagtctgctgtgactatagcctgcacgtggcagtgacatggtggagtgacaaggtaaaagaagaaatgaaaacccttgcccaagataaaggcgttaactctttcaagatgtttatggcctacaaagacctgtacatggtgcaagaccagcaaatgtacgctgccttttctcagtgcaaggagataggggccattgctcaggtgcatgccgagaatggagatttgattgcagagggggccaagaagatgctggcactggggataacgggccccgaggggcacgagctgtgccgcccggaagcagtggaggcagaggccaccttgagagccatcaccattgctagcgctgtgaactgccctctatacatcgtgcacgtgatgagcaaatccgcagcgaaggtgatagctgatgcgaagagagaaggaaaggtggtctatggagaaccaattgcagcaggtctgggcacggatggcactcagtactggaataaagaatggcgccatgcagcccaccatgtcatgggtcccccactgagacctgatccatcaacgcctggctttctcatgaatctgttggctaatggcgatctgaccacaacagggagtgacaactgcactttcaacacctgccaaaaagctctagggaaggatgacttcactaagattcccaatggggtgaatggtgtcgaggacaggatgtcggtgatatgggaaaagggcgtgcacagtggcaaaatggatgaaaatagatttgtggcagttaccagcacaaatgcagccaaaatctttaatctttatccgaaaaaaggaagaatagctgtaggctcagatgctgacatggtgatctgggacccagaagccaccaggacgatctcagccaaaacacatcatcaggccgttaacttcaacattttcgagggcatggtttgccatggggtgcccctggtgactatttcaagaggcagagtggtgtatgaagcaggcgttttcgacgtcacagcaggacacgggaagtttattccgcgacaacctttcgctgagttcatttacaaacgagtcaagcagcgagaccagacctgcacacctataccggtgaagcgtgcgccctacaagggagaagtcatcacattgaaacccagagagacaaaagaagacgacacagctgggaccaggatgcagggccattcctgatttggatgctggggttaagcaagtgcaaacagagtgaaggctcccaggctcccctccccaccatgctgccaagccctggagaagcacctgccatttcaactctccaagatcctttaggaaaaattcatcgctctaggcctctttgatttttctctcagaagcaatagcagcctgcctcaccctgcctttgttgctgtggaagattgaggatataaatgaacattattgggatgaaacgtctgcatgaagattcattgaagattcctttttcaaatgccatctctccttaccctagatttctttctttgggtttttaaagatttccttctggtgtaaaggttttgtttgtttgttttgttttaatgtttatgtttgttttaaaaatcagtgattttacatttcattgcaactaataaacatctggagcttcattctgc

SEQ ID NO: 154 - DNA, 179 bp, Rattus norvegicus (rat)
ctgagttcatttacaaacgagtcaagcagcgagaccagacctgcacacctataccggtgaagcgtgcgccctacaagggagaagtcatcacattgaaacccagagagacaaaagaagacgacacagctgggaccaggatgcagggccattcctgatttggatgctggggttaagcaagt

SEQ ID NO: 155 - DNA, 1621 bp, Rattus norvegicus (Norway rat)
gtggatcgcccgggagaactgggcccagggctcaggtggagctgccgatgccccgggctgaaaggtgagaccacgctggtgaggctgggacaagaccttgcacctccagacctgggccgagaccacaaggggagccgccaagatgccagaggaaaatatcttcctgttcgtgcctaatcttattggttatgcccggattgttttcgccatcatttccttctactttatgccctgctgccccttcacggcctcctccttctatctactcagcggacttctagacgctttcgatggacacgcagctcgagcccttaatcaaggaacccgatttggggccatgctcgacatgctgacggaccgttgcgccaccatgtgtctcttggtcaacctggccctgctctaccctcgggccactcttctgttccagctcagcatgagcctggacgtggccagtcactggctgcatctgcacagttctgtggtgcgaggcagtgagagccacaagatgattgacctgtctgggaaccctgtgcttcgaatctactatacttccaggcctgctctgttcaccctgtgtgctggaaatgaactcttctactgcctcctgtacctgttcaatttctccgagggaccactagtcggctctgtggggcttttccgaatgggcctctggatcacagctcccattgccctgctcaagtccatcattagtgtcatccacctcgtcacggctgcaaggaacatggctgccctcgatgcagcagaccgcgccaagaagaaatgatcctctcccatccccagctgcccacctgccctgggtatctactgtgccacatggctcctctcctcctaagaggtcccagtgtcatgtctttctcatgtgttctctaacctgctgggattgggggtcaccctctgtttggtgttgtcactgtctttttactcctgataactagacccaacccgtgaccccaaggacctggcactgcaaagcaggaagggtgctcaggaggcccactcatccagccggtgctccaggaggcctgtctgaagactgggtgttgccacatatcctgctggatcagcctggggtctggcctgagactttgggaacttatacgggcaaaggagtcaggctgatgggccaagaaggctggggtaccaggccagggagggaaggggccaagggccaactagatctttcccttaggcaagctcctctatcctgtcctgctctggaaacctccataataaaggggggcaccttcactctttttggatttgtttactttgggacactcttagatgatggcctagggttcaaaggagctgggtaaaaaaaaaagaaatccacctggatgcttttcccacaaaggtggttggctcctccctgtcattccagtgacctcagagaggcctcgaggttcacaagcgttgtcctgcccacctgctctatgtcctggctggccactttcactgtaaccttgatgtttttgaccctcatgagaatgtaagcttcacaagagcagatttagatctttctcgtctctgcctggagtgaaaagtagcctggcatgtggtaactgcttaataaatattcatggaaagatgaaaaaaatac

SEQ ID NO: 156 - DNA, 1049 bp, Rattus norvegicus (Norway rat)
gccttcggttttagggagagcaggccgggcggtcagagatcatgggggagagcgcactggagcccgggcctgtgcccggggcgccggctgggggtccggtgcacgccgtcaccgtggtgactttgctggagaagctggccaccatgctagaggcgctgcgggagaggcaggggggcctggctgagaggcagggcggcctggcgggctcggtgcgccgcatccagagtggcctgggcgcgctgagtcgcagccacgacaccaccagcaacacactggcgcagctgctggccaaggcggagcgcgtgggctcccacgccgacgcagcccaggagcgggcagtgcaccgcgccgctcaggtgcagcgactggaggccaaccacgggttgctggtggcgcgcgggaagctgcacgtcctgctcttcaaggaggagactgaaattccagcccgcgccttccagaaagcaccagagctcttgggcccggaggaccagttggtgctaggcccagagcagccagaggatgaagttggagagagttctgatgaggaacccgtggagtcccgggctcagcggctgcgacgcactggcttacagaaggttcaaagcctgaaaagggctttttccagtcgtaaaggctctgaagcagcacagcccacgccagtcaagccgccacgcctaggtcctgtccggaactccgaaggcccggcagaaggccagcctgcagctcagcctgcaatggagcctgtgctcccgtctgccctggagccagaacctcctcagcctaccaaggaagatcctgagagacctgtgcttcaaatagagagcgcagcctgatccctggggctgcctgccccattcagcccttatgccttgtcccaaaaataaatactaatcgagtgcagcacttacatccaaataaggagagaatcctgcatccactgcccggctccaatccttccttcctggttttccagtctggtaccctgtgtcctctgaaagaggaacattcggccttgtttaggttcaccaccaataaaagtaattttctct

SEQ ID NO: 157 - DNA, 319 bp, Rattus norvegicus (rat)
ctccgaaggcccggcagaaggccagcctgcagctcagcctgcaatggagcctgtgctcccgtctgccctggagccagaacctcctcagcctaccaaggaagatcctgagagacctgtgcttcaaatagagagcgcagcctgatccctggggctgcctgccccattcagcccttatgccttgtcccaaaaataaatactaatcgagtgcagcacttacatccaaataaggagagaatcctgcatccactgcccggctccaatccttccttcctggttttccagtctggtaccctgtgtcctctgaaagaggaacattcgg

SEQ ID NO: 158 - DNA, 1726 bp, Rattus norvegicus (Norway rat)
cgatcgcgcaagtcggacccgtggatcacagcctgtagatcgcggcccgggcctggaggacaacagcaagtgaagggggttcctcttcctgaaggaggggtcatggccttcttgttgactacccgacggctggtctgcagttcccagaaaaacctccacctcttcacacctggatccagatacatcagccaagctgctgccaaagttgactttgagtttgattatgatggaccactcatgaagacagaagtcccgggccctagatctcaggagctaatgaaacagctgaacacaatccagaatgcagaggccgtgcactttttctgcaactacgaagagagccgaggcaactacctcgtggacgtggatggcaaccgcatgttggacctgtattctcagatctcctctgtacccatcggttacaaccatccggctctggcgaaactcgttcaacagcctcaaaacgcgagcactttcatcaacagacctgccctgggcatcctgcctccagagaactttgtggacaagctccgggagtccttgatgtcggtggcgcccaaaggcatgtgtcagctcatcacgatggcctgcgggtcctgctccaatgagaatgcattcaagaccatcttcatgtggtaccggagtaaagaacgaggtcagagaggtttctccaaagaggagctggagacttgcatggttaaccagagtcctggatgcccagactacagcatcctctccttcatgggtgctttccacgggaggaccatgggttgcttagcgaccacacactccaaagcaattcacaagattgacatcccttcctttgactggcccattgctccattcccacggctgaaatatcccctggaggagtttgtgacggacaatcagcaagaggaggcccgctgtctagaagaggtggaggatctaattgtgaaatatcggaaaaagaagagaacagtggctgggatcatcgtggagcccatccagtccgaaggtggagacaaccacgcatcagatgacttcttccggaagctgagagacatagccaggaagcatggctgtgccttcttggtggacgaggttcagactggaggaggctgtacaggcaagttctgggcccatgaacactggggcttggatgacccagccgacgtgatgtcgttcagcaagaagatgatgactgggggcttcttccacaaggaggagtttcgaccaagtgctccttaccggatcttcaacacctggctgggggacccatccaagaacttgctgctggctgaggtcatcaacatcatcaagcgggaagacctgctcaacaacgtggcccatgccgggaagaccctactgaccgggctgctggacctccaggcccagtacccccagttcgtcagccgggtgaggggacgaggcaccttctgttccttcgacactcccgacaaagccatacggaataaactcatcctaattgccaggaacaaaggtgtggtactggggggctgcggtgacaaatccatacgtttccgtcccacgctggtcttcagggatcaccatgcccacttgttcctcaacattttcagtggtatcttagcagacttcaagtaaagaagccatctccacgacattcagagaaagctctgtcccagcggtgtcaacttgattagtttgcctaattcatattttcacttcaaagtttatcagaggcgaatgcataaactaaagggtc

SEQ ID NO: 159 - DNA, 1156 bp, Rattus rattus (black rat)
cctggagctttcgccttcgcctccggtaccgctacctgttctgaacggatctccggccgactcgtccctgcgtctcatggccgctagcagatccctggtgcccgaccggctgcgcctaccactctgcttcttgggtgtctttgtctgctacttctactatgggatcctgcaggagaagataacaagaggaaagtatggagaaggacccaaacaggagacattcacctttgccttaactttggttttcatccagtgtgtgatcaatgctatgtttgccaagatcttgatccagttttttgacactgccagggtggatcgcactcggacctggctctatgctgcctgctctgtctcctatgtgggcgccatggtctccagcaactcagcactacagtttgtcaactatccaactcaggtccttggtaaatcctgcaagccaatcccagttatgctcctcggagtgaccctcttgaagaagaagtacccattggccaagtacctgtgtgtgttgctaattgtggctggcgtggctcttttcatgtataagcccaagaaggtggttgggatagaagagcacacggtcggctttggagagctccttctgctcttgtctctgaccctggatggactgacaggtgtttcccaggaccatatgcgggctcattaccaaacaggttccaatcacatgatgttgaacatcaacctttggtccacggtcttgctcggtgctgggatcctgtttactggggagctctgggagttcttgagtttcgccgagaggtacccgaccatcatctataacatcctgctctttggcttgaccagtgccttgggtcagagctttatcttcatgacagtcgtgtacttcggccccctgacctgctccatcatcaccacgactcggaagttcttcaccatcttggcttctgtgatcctctttgccaatcccatcagctccatgcagtgggtgggcaccgtgctggttttcctgggtctgggtcttgatgccaagtttgggaaaggaacaaagaagacctcccactaggaaaagagaggcttcctccactccagaaacacttaaattattatctccaacagtgacatcttgggaaaatggactcagtcacgataagggactgggttccaatctttttat

SEQ ID NO: 160 - DNA, 3100 bp, Rattus norvegicus (Norway rat)
gagtgctgggtttggtggccaaagcccccatcctaggccggcatgtctctgcagaggactgtacgtgtatccctggaacacccaaccagcgctgtgtgtgtggcaggggttgagaccatcgtggacatttatgggtcggttcctgagggcacagacatgtttgaggtctatgggacaccgggagtggacatctacgtgtctcccagcatggagaggaaccgagagcgagctgacaccaggcggtggtgcttcaacaaggggctggagatcatcgtggtcatgaactctcctagcaatgacctcaacgacagtcacgttcaaatagcttaccactccagtcacgagcatttgcccctggcctatgcagtactctacctcacctgtgtggacatcaccctggactgtgacatgaactgtgctgaccggcaggacaggagcttcgtggataagaggcagtggatgtggggacctgatgggtacggagccatcttgctggtgaactgtgatcgggacgaggtcagctctgatgcccaagataactgtgaccaatgtgtgcgctgcctgcaagatctggaagacatgtccgtcatggtcctacggacccagggccccgaatctctctttgacgaccacaggcttatcctccacacctccagctgtgatgcggagcgggcacgggtcttccacgtctgtggccccgaggattcctgcgaagcctataggtgtgttctgggcccggaccggatgtcctatgaggtaccccgcctgaagggctatgaggagcgcttctacgtggagggcctctccttccctgatgcaggcttcccagggatcctctccttccatatcaccctgctggatgactccaatgaggactactccgagaccccgatcttcacggacacagtggtgttccgagtggcaccctggatcatgacgcccagcaccctgccacccctggaggtgtacgtgtgccaggtgaggaataacacctgctttgtggaagctgtggaggagctggccaggaaggcaggctgcaaactcaccatctgtcctcaggcagagaaccgcaatgaccgatggatccaggatgagatggagctggggtacacgcaggcgccacacaagactttgcctgtggtctttgattctccgaggaatggggagctgcagggtttcccttacaaaaggatcctgggtctagattttggctacgtgactcgagaacctccagacagttctgtgagcggtctggactcctttggcaacctggaggtcagcccgcccgtggtggccaatgggaaggagtatccactggggaggattctcatcgggggcaacctgcctgggtcgagaggccgcagagttacccaggtggtacgagacttcctccatgcccagaaggtgcaacctctggtggagttgtttgtggactggctggctgtgggccacgtggatgaatttctgagcttcgtccctgcaccagatggaaagggcttccggctcctcctggccagccctggtgcctgcttcaggctattccaggaaaagcagaagtggggccatggccggtccctccttttcgagggggtcattggtgacaggcgggtccagaccatctccatcaatcaggttctttccaaccagagccttatcaactttaataagtttgcacagagctgtattgactggaaccgtgaggtgctgaagcgggagctaggcctgggggagagcgacatcattgacatcccacagctcttcaagtcggagaagaggaaggcggtggcgttcttcccggacctggtgaacatgctggtactgggcaagcacctgggcatccctaagcccttcgggcccatcatcaatggccgctgctgcctggaggagaaggtgcgctccctgctggagccgctgggtctgcactgcaccttcattgatgacttcacaccgtaccacatgctgcacggggaggttcactgtggcaccaacgtgcgccgggagccctttgccttcaagtggtggcacatggtgccctgagccgcccgccacccatcccccatccgtcccccaggatagggcatccgcccggcaggtggagactgcgacagaccccagagcacccagagactcccagtttctagactgaatgacccaagcttctcagaagccttttctcttgaaatgtccgcatccacctgctgcccattcagttcccagacatgaatcctcttggtgcccccaaagaagggtcccatgtcaaccaaactctcctgcgggtcgagatgatccatggggataactttaaataccattcaccccccccccacccccgcaaactccaaaactcctctttgtggggaaaaatccgcttgggtatctagaagcattgaccttggcttgtgcttcctatggtggaaggcctggggcggtgggggttggtggggttgttttggccattgcctcctgccctgcaggggatggttgtaaagtcagactatttcacaccctcactactcgactagagggagtctaccctcccaggaagcaccccgggtccattcaggtcaaagtgtgtccatcatgtccactgcaagctcccggcaggaccggcctttactgcaagccagcctgggctatcacacggtggggacctgtcacacaatggggacctctagatgcttttgcaatgacagatgtcccttagctttccaggcttcccatcatccgatgtctgggaatctggttgtccaaatccttttggagtttctctgaagtgaatgattggggggctggattcccaggggagaacgcctttcctaagacaggattgaccctcggggtcccaccatctgaaggggttcctccatcagcttgcctgggggctctgtgcagaggagaccccaggctgacttagcccagagccttctgcctatacagccatcccgtagtagaggcccgggaagtgccaccctgggtgccatcaaggcaggacttagagggacagttaagcctctccacatactgggagaagggagggatgtggctgtctcagtatgggtcttctgtgagttcagctggccaaaaaataaaacagaggctc

SEQ ID NO: 161 - DNA, 1523 bp, Rattus norvegicus (Norway rat)
acttctacatcaagatccgtcctggggagtatgagcagttcgagagcaccatcggcttcaagctccctaaccttcaccttcattgcgccacggcggctttcggacgagcctctgactcgcgcacgcgttagactccttggtccgtgttacaagacgggtcgggtgggtagccgacatcgccgccgaccccgtgccgtcgcagccaagatgtccggtcccaccaccgacacgccggccgccatccagatctgccggatcatgcgtccggatgatgccaacgtggccggcaatgttcacggagggaccattctaaagatgatcgaggaggctggggtcatcatcagcacccggcactgtaacagccagaatggggagcgctgtgtggctgccctggcccgggtggagcgcactgacttcctgtcgcccatgtgcatcggtgaggtggctcacgtcagcgcagagatcacctatacttccaagcactctgtggaggtccaggtccacgtgttgtcggagaacatcctcacaggtaccaaaaagctgaccaataaggccaccttgtggtatgtgcccctgtcattgaagaatgtggacaaggtccttgaggtgcctcctattgtgtatttacggcaggaacaggaggaggagggtcggaaacgctatgaagcccagaagctagaacgcatggagaccaagtggaggaacggagacattgtccagcccatcctgaacccagagccgaacacagtgagctacagccagtccagcctgatccacctggtggggccctcagactgcactcttcatggcttcgtgcacggaggtgtcaccatgaagctcatggatgaggtggccgggattgtggctgcgcgccactgcaagaccaatatagtgactgcctctgtggatgctattaatttccatgacaagatccggaaaggctgtgtcatcaccatctctggacgcatgaccttcacaagcaataagtctatggaaattgaggtcctggtggacgctgaccctgtggtggacaactcacagaagcgctaccgggctgccagtgccttcttcacctacgtgtccctgaatcaggagggcaagccgctgcctgtgcctcagcttgtgccggagacggaggacgagaagaagcgttttgaagaaggcaaaggccgctatctgcagatgaaggcgaagcgacagggccatacagagcctcagccctagatgtcttcctccctcccatcctgtcccgtcctgggtcagcacagttgtggcagtagtcctgtgtgcagtcacttagaagtcgcccccttggccaaaccccgatttcctttgagagctggtgttgtgaagtaccgtgtgacagtgttacctgtggcctgttcccaaaacctgtgcaccaaagctttatttatatccctccagtccctgtcccatgttgtcccaaaggccatcgtggacaccagagcacactgactggcctggagaagccagcaccactaataaagctgctgtctggctgg

SEQ ID NO: 162 - DNA, 981 bp, Rattus norvegicus (Norway rat)
tcctttggtctccgacggcctttctacccacacgcagccatgtcttccgacagacccgtggcactggtgactggtgctaacaaaggaatcggattcgcgatcgtacgtgatctctgtcgtaaattcttgggggacgtggtcctcacggcgcgggacgagtcacggggccacgaggcggtgaagcagctgcagaccgagggcctgagcccacgcttccaccagctggacatcgacaacccgcagagcatccgcgcgctgcgtgactttctgcttcaggagtacggaggactgaacgtgctggtcaacaatgcgggcatcgccttcaaagttgttgaccccacccccttccacattcaagcagaggtgacaatgaaaaccaacttttttggtacccaagatgtctgcaaggagctactccctataataaaaccccaaggcagagtggtgaatgtatcaagcggcatgagtcgcagggccctgaaaagctgcagcccggagctgcagcagaagtttcgaagtgagaccatcactgaggaagagctggtggggctcatgaacaagtttatagaggatgcaaagaaaggagtccatgcgaaagaaggctggcccaatagtgcatatggggtcaccaagataggggtgacagtcctgtccagaatctatgccaggaaactcaatgaggagaggagagaggacaagatcctcctgaatgcctgctgccctgggtgggtcagaaccgacatgacaggaccagaagccaccaaaagcccagaagaaggagcagagacccccgtgtacttggcccttttgcctccaggtgcagaggggcctcacgggcagtttgttcaagataaaaaagttgaaccatggtgaatccaactctcacccccaccccttctatcctgacttggtgaaagccaagggacatttataatataccatcacttctggaaaaataaacataactaagtctttaagcac

SEQ ID NO: 163 - DNA, 1928 bp, Rattus norvegicus (Norway rat)
gagcctacgcacgtgtcctgtctgtctccagactccgcgacccggcgcagcagccatggcttcctcccagcttgccctgttcagtgtgtctgacaaaactggcctcgtggaatttgccagaaaccacgcgtctcttggtttgagtttggtcgcttctggaggcacggcaaaagcgatcagggatgctggcctggcagtgagagatgtgtctgagctaactgggttccctgaaatgttaggggggcgtgtgaaaaccttgcatcctgcagtccatgctggaatcttagcacgcaatattccagaagatgctgctgacatggccaggcttgatttcaacctcataagagttgttgtctgtaacctgtacccgttcgtgaagactgtggcttctccagatgtaaccgttgaggcagctgttgagcaaattgacattggtggcgtgaccttactgagagctgcagccaaaaaccatgctcgagtgacagttgtgtgtgagccagaggactatggtgcggtggctgcagagatgcagggctctggtaataaggacacctccctggagaccaggcgccacttggcattgaaggcattcacgcataccgctcaatatgatgaagcgatttcggattacttcaggagacagtacagtaaaggaatttctcagatgcccttgaggtatgggatgaacccccatcagactcctgcccagctgtatacactgaagcccaagcttcccatcacagttctcaacggagccccaggattcataaacctctgcgatgctttgaatgcctggcagctggtgacagagctgagaggagcagtagacattccagctgcggcgtctttcaagcacgtcagcccagcaggtgctgctgttggggttccactcagtgaggacgaagccagagtctgcatggtctatgacctctatccgaccctcacgcccctggccattgcatatgcaagagcaagaggagctgataggatgtcttcatttggtgattttgttgcattatctgatgtttgtgatgtcccaactgcaaaaattatctccagagaagtgtcagatggtattgttgccccaggatatgaggaagaggccttgaaaatactttctaaaaagaaaaatggaagctactgtgttcttcagatggaccagtcctacaaaccggatgaaaatgaagttcgaacactctttggtcttcgtttaagccagaagagaaataatggtgttgttgacaagtcgttgtttagcaatattgtcaccaagaataaagatctgccggaatctgctctccgagacctcattgtcgccaccatcgctgtcaagtatactcagtctaattcggtgtgctatgccaaggacgggcaggttattggcatcggagcaggacagcagtctcggatacactgtacacgccttgcaggtgataaggcaaactcttggtggcttcggcaccatccacgagtgctttccatgaagtttaaagctggggtgaagagagcagaagtctccaatgccatcgatcagtatgtgaccggcaccattggtgagggtgaagacctggtgaaatggaaagcactgtttgaagaggttcctgagttactcactgaggcggagaagaaggaatgggtggacaagctgagtggcgtgtctgtcagttccgatgctttctttcctttcagggataatgtagaccgagcgaaaaggagtggtgtggcctacattgttgctccatccggatctactgccgacaaggttgtgatcgaggcgtgtgacgagctggggatcgtgttggctcatacagatctgcgtctcttccaccactgaccttggctgacattgttacattgtttcctagtgggagatactcatgtgtgggaccctgaaagtatctctttttaaacagagtcattcttatctt

SEQ ID NO: 164 - DNA, 4269 bp, Rattus norvegicus (Norway rat)
tctcggccgcggtgtttccgtttctctccctggttgtcgcctgctctgctcttctcatccttctcgctctgctgctctgcggagtgacgaggctgaatcttctccccacccagttcgcgcttttcttctttttctcgcgccgctccatttctccagtccggctgccgccgccactgctgctcagctggtgtcggtgccgcgcgtttcccccacgtcgtccccgcagcctatggcccaggccgccttgggtatttctgctcaaggtaaccacatccctctttaaaaattccgccgaaaaagagaagacgctttacccgactctttgggccgttatctcacggcgaactttctgaccgagtatacaactacccagaaggcctaggagaagtgctgtatagagagcagttcgattttaacgctgagccaccttgggaacctagctgatgataggggggttccatctcctaacttgtccatggaggtcttcacttcagaaacccaagactcacattcatccagcttggtgtcaagtgggctgttgctgccaggattatcttgtgattatatgaaagatgtatcagtttcttctgaagtgcagtcaactgtagaagcctttgtagcaggtgtgtaacaagtttgttgcatattctaaggacccagacataggcttggtggcccgtctcttgtttttcctggtttatgactttcggctttgtggaatacggctgagatgaaaggatttattgacgatgcaaactactccgttggcctgttggatgaaggaacaaaccttggaaatgttattgataactatgtttatgaacataccctgacaggaaaaaatgcattttttgtgggggatcttgggaagatcgtgaagaagcacagtcagtggcagaacgtggtggctcagataaagccattttacatggtgaagtgcaactccactccagccgtactggagatcttggcagctcttggaactggatttgcttgttccaccaaaaatgaaatggctttagtgcaagaattaggcgtatctccagaaaacatcatttatacaagtccttgtaagcaagcatctcagataaagtacgcagcaaaagttggagtaaatattatgacatgtgacaatgaagttgaattaaagaaaattgcgaggaatcacccaaatgccaaggtcttactacatattgcaacagaagataatattggaggtgaagatggtaatatgaagtttggcactacactgaagaactgtaggcatcttttggaatgtgccaaggaacttgatgtccaaataattggggttaaatttcatatttcaagtgcttgcaaagaatatcaagtctatgtccatgccctgtctgatgctcgatgtgtgtttgacatggctggggagtttggctttacaatgaacatgttagacatcggtggaggcttcacaggaactgaaattcagttggaagaggttaatcatgttatcagtcctctgttggatatttacttccctgaaggatctggcattcagatcatttccgaacctggaagctactatgtatcttctgcatttacgcttgcagtcaatattattgctaagaaagttgttgaaaatgataaattatcctctggagtagaaaaaaatgggagtgacgagccagccttcgtgtactacatgaatgacggtgtttatggttcttttgcaagtaagctttctgaggacttaaatactgttccagaggttcacaagaaatacaaggaagatgagcctctgtttacaagcagcctttggggtccatcctgtgacgagcttgatcaaattgtggaaagttgtcttcttcctgagctgagcgtgggagattggcttatctttgataacatgggagcagattctttgcacggaccgtctgcttttagtgacactcagaggccagctatttatttcatgatgtcactcagtgattggtatgagatgcaagatgctggaattacttcagatgcaatgatgaaaaacttcttctttgcaccctcttgcattcagctgagccaagaagacaacttctccactgaagcttaaacaggcattaacgcttctttagatctgaagtcgcaggttaagcttgtctggtctacattccagtgtggggaaaaattcaatcaatctttattctgttaattttcttggaaacaaattcatagtaatagctgtttgggaccagacaaaatcagctttcatctataattcattgggggtaataggggatttatttagataatgtatccagatttaaacataccagtttgacccaccccttaagcgtttaaaataaaatatgcaacaaaatggatgacttagtggagatggaagcccattaattgggttccccatcaaatcgtttacatacaagtacacagtttttataataaggattcctgttaaaagtcttgtaaagttgatgtctttcacccagatctatcacatgtgagtggaagaccagtgtgacttcattagatacgtttagtgtatttagagtgtgtaaatttgtgctttggactgtagtttaataaatgtaaaattgcatcatagtatttgttgtatttgacctaatgtaaccttgtatgattgcaataaaactttgtgtagattttaccattttttcaggctaaaaatttgggaatggggctagctagcaaaggtagttttgaactagttgtgtgtatggtctgttttgagagttttctttatagtccatttgtttggtttggctcaatatactttttagttatttaattagtaatttaagtaaaaagtgtttggtaatcattgtgaagttcagattcattatggagagtcgatgtgcagtaagcatgatgtttaacaattttaacaccagaaaatgttaatcttgcataaaccaattgtaataataataggtgtttctgtatagataggatgcatagagtaccttagtaaatctttgaatcacaaatcttttggctgatagaaaagattttattaaacactgaaaacttggtcggggatggggagagagactgcagaagactgcagaaccctaaccttaaagaagggctatgtctatttccagcatcctgatgccccttcgcacagacatttaaatcgagagggctttggggtggtgaagcacactcttcaatttctcacttgtaatggtatcaaattgcaatttttttgttgttgctgatcttggtttgaacctagtcccttagtttcttgttaattcccatttgttcaagcttagtaattcttccttccgtactaaagcttggtggggggtggggggaggagttagcttcactaacctgacactgttgccaggaattttggctttgttcactgctagtgtgttagtcctaagtctcagaatcacagaagtaatgagacaacttacaggggtcacttttcctaccttactctatgttcacaagtggaattcctgacctccaagaggaaatgtgacttcactttggtgccaatggacaggaaattctacctgtgctacataggagaagtgtgggatacacttgaatagctggattttacaccttgatttcaaggtggaaagaaattgatcatgaatctctaatttcaaatcaaaccagtaggtgcttaatatttttgatttgaatattgcccacttgaatatcatgggttctattaattataagaacaactaaggaccccagtccactgtcatctagttgcccttggacttttttccaaggtatactatggggtttatgcaaaatttgaagctaccatatgcattgttgtggtccaggaatgccaaaacttaaagcgtggtacaacctgagtccttggcctgactgtacaggcgtggtctctgtggcatcagttttgccttctgcataggagaaaggttgtatgtaacacagcccggaattgctatctcacatgtgaatgataggtaaacataagaatgtctgtattgtttttgaagactgtttgccataaatctaaagtcaaacctatgtatttcaatttggtatgcttaagaataattaatgtaaaatctttttatatgatattgtaatctcagttcaaatttaattgcaaatataaaacccaaatgatttctatatatagtaaattgaactgtcaaggtaacttgtgtgtgattctgaatacacagatacaatgtttttattcctcatgctttactttgatggcttctatcatgaaatagatgtgaaattttatgaaaaaaa

SEQ ID NO: 165 - DNA, 3657 bp, Rattus norvegicus (Norway rat)
ccaacacagaactatggaagtccacgaattgttccggtattttcgaatgccagagctgattgacattcggcagtacgtgcgtacccttccaaccaacacactcatgggcttcggggcttttgcagcgctcaccaccttctggtatgccacccggccgaaggccctgaagccaccatgtgatctgtccatgcagtctgtggaagtaacgggtactactgagggtgtccgaagatcagcagtccttgaggacgacaagctcttgctgtactactacgacgatgtcagaacgatgtacgatggcttccagagggggattcaggtgtcaaatgatggcccttgtttaggttctagaaagccaaaccagccatatgagtggatttcttacaaacaggttgcagaaatggctgagtgcataggctcggcgctgatccagaagggtttcaaaccttgctcagagcagttcatcggcatcttttctcagaacagacctgagtgggtgaccatcgagcaggggtgcttcacttactccatggtggttgttccgctctatgacacgcttggaaccgacgccatcacctacatagtgaacaaagctgaactctctgtgatttttgctgacaagccagaaaaagccaaactcttattagaaggtgtagaaaataagttaacaccatgccttaaaatcatagtcatcatggactcctacgacaatgatctggtggaacgcggccagaagtgtggggtggaaatcatcggcctaaaagctctggaggatcttggaagagtgaacagaacgaaacccaagcctccagaacctgaagatcttgcgataatctgtttcacaagtggaactacaggcaaccccaaaggagcaatggtcacccaccaaaacattatgaacgattgctccggttttataaaagcgacggagagtgcattcatcgcttccccagaggatgttctgatatctttcttgcctctcgcccatatgtttgagaccgttgtagagtgtgtaatgctatgtcatggagctaagataggatttttccaaggagacatcaggctgcttatggatgacctcaaggtgcttcagcctaccatcttccctgtggttccgagactgctaaaccggatgtttgacagaatttttggacaagcaaacacgtcagtgaagcgatggctgttggattttgcctccaaaaggaaagaggcggagcttcgcagtggcatcgtcagaaacaacagcctgtgggataaactcatctttcacaagatacagtcgagcctgggcgggaaagtccggctgatgatcacaggagcagccccagtgtctgccacagtgctgacgtttctgagggcggctctcggctgtcagttctatgaaggctacggacagaccgagtgcaccgctggttgctgcctgagcttgcctggagactggacagcaggccatgttggtgcccccatgccttgcaattatatcaagcttgtagatgtggaagatatgaattaccaggctgccaagggcgagggtgaggtgtgtgtgaaaggggcaaatgtgttcaaaggctacttgaaagacccagcaagaacagctgaagccctagataaagatggttggttacacacgggggacattggaaaatggctgccaaatggcaccttgaagattatcgacaggaaaaagcacatatttaaactagcccaaggagagtacatagctccagaaaagatcgaaaatatctacctgcggagcgaagccgtggcccaggtgtttgtccatggagaaagcttgcaggcctttctcatagccattgtagtacctgatgtggagatcctaccttcctgggcacagaagagaggatttcaagggtcctttgaagaactgtgcaggaacaaggatatcaataaagctatcctggaagacatggtgaaacttgggaagaatgctggtttgaagccatttgaacaggtcaaaggcattgctgtgcacccggaattattttctattgacaatggcctcctgactccaacactgaaggcaaaaaggccagagctgcggaactatttcaggtcacagatagatgaactgtactccaccatcaagatttaacatgaggaagaatccttagaggaaatggcgcacctccacaatcctcctcgtaccaatggcctttgagttggtaactctgcctgcagcgagtgtgggaaaggaaatgccatgctggacttgtgcacagggtcttaccatagggatagcagagggcacggaacactgccttacagtcacctgtgttgtagcccatgatcctggggatacacagtttccaaaacgagccttaaacattgtaaaggggaacccataaaagtgctaagttatttaagacttcaaccaataaggtgggtgttaaaacttctgtctcctgtttttctaaccaaggggttaggacttactctttctgatacgtctgctgctggctgcacaccctgcagccgtctgctgctctgaagagtacagtacactggaagaaagctacccctttaagagcaactgtccaggctgaagaaagtcacagtggaccagagatttctcttcttaaccccttccccttgtccctttccctcaccactcacatgcagtacatttatgtgacccttctggtttgtaagggttccaaagggtccctgttgtgcctgctggtaacctcgtgtttccagtacactaaagaacagatcctcctcagaacaatgcgggtacccagtctcagaaaaggaaaaaaaaaaaaaggtggctcctgcgttgagccagcaacttgcaggctcacacagatgtcctcagactccgctccatctctgctccctgcccctcccattcttcccaggggttatgagaaaccctgccttagactctgcagtgaagatggtgttccgaagaatgacctggatgggccatgctcaactgtgattcctcccccgctgtccactcgctcgctcgtcgtggaaccagcccgtatctgcagcggcctctgtgctccaaatgtggttttctagcaaatgctaatgtggtgatcaacttgctttgttttctttccctcccagttaaactcaggcacagcatgtcttcagaagtatctaggcagttggtatacgtgggtacttattaaagtggacagtaataagtaaatgtccttattataaaactacctgatttatgtgaaatgcatttgataagccaaaaatctggggtgtagaaatctgggggaaaaaaaatcatatcctgggatcaacttcccaaggtatattttttaagttaatttgggaaatgaacagcatttcactttgccgcgagtcttggccacatttgacctatttgagctgtttatacatttgaagccactgttgttggctgtgtgacagtgtgtgtatcttgaagcacaactgggtttgcactaaagaatcatcattgtaataacactatttggtagcctaacttcattttcgtattcttaactgcacaggaagtcgataatttgtcacaacggggttttgaatgtttgctttcagtgttggctatttctatgttttataaaccaaaacagaatttccaaaaacaatgaaggaaaccaaaataaatatttctgcatttggagtgagtgg

SEQ ID NO: 166 - DNA, 1174 bp, Rattus norvegicus (Norway rat)
ccgcagccttctttgacgatcaccgaaccgtagttgaggccgtgttcctgtgtccgctgctgtgtctggttgtaacctcgccggagctatgtttcgcaaccagtatgacaacgatgtcactgtttggagccctcagggcaggattcatcaaatcgaatatgcaatggaagctgtaaagcaaggctcagcgacagtcggcctgaagtcgaagacacatgcagtgctggtcgcgctgaagagagcacagtcagagcttgccgctcaccagaagaaaattctccacgttgacaaccatattggtatctcaattgcgggtctaactgctgatgccagactgttatgtaactttatgcgccaggagtgtttggattccagatttgtatttgacagaccacttcccgtatctcgccttgtgtctctaattggaagcaagacccagataccaacacagcgatatggccggagaccgtatggtgttgggctgctcattgctggttatgatgacatgggccctcacgttttccaaacctgcccatctgctaactattttgactgcagagctatgtccatcggagcccgttcccagtcagctcgcacttacctggagagacacatgtctgaatttatgcagtgcaatttggatgaactggttaagcatggtcttcgcgccttaagagaaacactccctgcagaacaggacctgaccacaaagaatgtttccattgggattgttggtaaagacttggaatttactatctatgatgatgatgatgtgtctccattcctggatggtcttgaagaaagaccacagagaaaagcacagccttcacaggctgctgatgaacctgcagaaaaagctgatgaaccaatggaacattaagtgataaaggttatgaggacatgaggatgcaggggcatacactggtgacaataatctgtattttaaaccaacagctgtaatgtattgggtggtatgttttagaaatcagtccaactgtgagttttctctaagcagcttcacagaaaccatataatggggtgcattttctttgaaagggtctacataatcattttctaggacgtataggtatctatatcaatgtttttatatgaagaaaataagtgtctttgcagttttaaagacaactgtgaaataaaattgtttcaccacctg

SEQ ID NO: 167 - DNA, 1983 bp, Rattus sp.
ggaccgtcgccatgcgtcgtgtaccgctgctgctcgtgctgggcttgctgttcgtgctgggcttgctgttcgctggccctgtcgccccttcgcgcctcatctcgaagcgcccttcccaacttggtggcttctcctgggataactgtgatgaaggaaaggaccctgcagtgatcaaaagcctcacgctccaacctgaccccattgtcgttcctggagatgtgatcgtcagtgctgagggcaagaccagcattcccctcacttctcctcagaaggtggagctcaccgtggagaaggaagtggctggcttctgggtcaagatcccttgcgtagaacagctaggaagctgtacctatgagaatgtctgtgacctgatagaccaatacatcccccctggagagacctgcccagagccgctgcacacctacgggctgccctgccattgtcccttcaaggaaggcacctactcactgccttcgagcaacttcacagtgcctgatctggagcttccaagctggctaagcacgggcaactaccgcatccagagcatcttgagcagcggtggaaagcgcctggcctgcatcaagattgccgcctctctcaagggcaaataaccaggcagcagccaccatagaatgaaagggcaccaggaaggcatgcttcttcttctgtgttccggggcccagagctgcctgcctctaactccgttctatggttctctaccctttctgcaaatcacgacaacctgacctgagggaggatggaccaggcgggtctcgacatctgttgggctgtacgccatgctccttcgcacccctaccaactttctaagagtttctctcatgtcccaaacagtcaaggaatgggaaccaacatgttatggaatcttaagttcaagctggcccaacatgggcctcctgaagctatgctcaccccacctcttcgttttagccaccaacttaaaaaccaagatgacagtattaatctctcattccaccctaaacctctcatccagcaaagaggtctaggtagccagtcttaggtctgcccccctattaacttccatgattaactacattccctttgcaacttgcctagccaacactggggctgacagatcctgaaagggcaggatggcgtgtgacagaaaccctgggagagttattgttgggcatgccccattaacctcagtaaagcacaggtgcccagggccaagcagatcgagggagccaaagcagtcactcccaggagcgatgcccacttttcttcctttggtatgacgcatacagaatgggatgacattccttatacctgacaagaaacaaaactgaaaccccaacagcacatgtgctccagtgccaggaggccagggtctggaatggcatgtctagtcctggaggtacagtccagtgacctgtaagtgccatgtaaggaatgttaccggatatttgcaacagttttcttccttaggccccaaaccccagacttttctatgaagtcttagattttttaactattagaaacaaattgttttttatatactgttcaggccaaaggggccacgtggacttgtctggggggtggggggggacatagctggctcacaggtggctgctttttttctcacacctgttcgtcttctcagtctcaagttatctgacttcatttctctccccctcaaggtcaagtccttggtaccagacctcagagagggctcagcctgcactggagcaggtctgcatggcctctgagagctgggccctgtgccagcctcagagccccatcaccatcagggtataggggttcacactggagtggatctccccacccccaccccccagcagccaccttgtggaacaggggtcccatgtagagagtggatcccacaccgggttgtaccatgacaacttcctgagcctccgtcagcccggttctggactgcaagactagtctgtcaataaatcttcttaaaaaaaaaaaaaaaaa

SEQ ID NO: 168 - DNA, 1733 bp, Rattus sp.
ggccgctgcacctgcccggtcttgcgccgagaccgctgtcaatcgcggggcaccaggaataaaaggccccttgcagagatttgaaaatggccatgaacaaaagtgttggcctcttcagctccgcatccctggctgtggactacgtagattccctgctgcctgagaatcctctgcaggaaccctttaagaatgcttgggtctacatgttggacaactatacaaagttccagatcgcaacctggggctccctgatcgttcatgagacgatctatttcctgttctctttacctggctttctattccagtttatacctttcatgagaaagtacaagattcaaaaggataaaccagaaacctttgaaggccagtggaagtgtttgaaaggaattctgtttaatcatttttttatccagttgcctctgatttgtggaacatactattttacagagtttttcaatattccttatgattgggaaagaatgccaagatggtatttcactttggcaaggtgtttgggctgtgcagtcatcgaggatacctggcactatttcctgcacagactccttcaccacaagaggatttataaatacattcataaagtccatcacgagttccaggctccatttggaatcgaagcagaatatgcacatcccttggaaaccctaattcttgggactggatttttcattggaattgtgcttttgtgtgatcatgtaattcttctgtgggcatgggtgaccatgcgtttgctagaaaccatcgatgtgcacagtggttatgatatccctctcaacccgttgaactacatccctttttataccggggctcggcatcacgatttccaccacatgaacttcattgggaattacgcctccaccttcacgtggtgggacagaatctttgggacggatgtccagtaccatgcctacactgaaaagatgaagaagcttgggaaaaagtctgagtgagcacctgctctccgccctcctgactgcagctggcaactaacattgcttctggggagcagaactaagcacgtgactcggctgctggtgataggaacattaacaacctttaagtactctgcgggatgagaactcttctgctcgacacccaagatctgtaaatgtgggaacaaagaaatagatacataagtacagttttcaggaggaggttttaaaggccatattgccaacctcaccgaaaggtttcaggaacccgaggaagtgttaatgtacaactcaccacttcacgccacccgaggctgaagttgacgttgccttttaagcctttttacatacactggccatttcagaaaattctcaacaataatgtctgccttcgagtttaagtcatggtgttttttagaattgacttgaaatgaaaatatcacaaagtgaatatatcagctggtgatcgagtgactgaaacccccctggtctgcggttgaccagttcaggactattctttctgtgaaggattgtttgattgtagtatctttatcagcatcttgtaaattggctcatttcctacgtgatgtacatagaatactataacttaacgactttcaagttacttggggcatttttaaattgaggagccccacttctgatgtccacccccttgtctttgtgtgtcaggtggtctcggagctttgtgaattctctatctgcacctgtcagagctggtgaaataaatgtgatttttgtccgaaaaaaaaaaaaaaaaaaaaa

SEQ ID NO: 169 - DNA, 2634 bp, Rattus norvegicus (Norway rat)
acactgtgaccagaaggactttgatgttcaaaatgcccagaaagtggatttctgctctgttcctgctacagataagttactgtttcaaatctgggcactgtgggaaggtgttggtgtggccgatggactttagtcactggatgaatataaaaataatccttgatgaacttgtacagaggggccatgaggtcactgttctgaaaccttcggcttacttttttcttgatccgaaaaaatcgtctgaccttaagtttgaaattttttctacatctatcagtaaagatgagctgcaaaatcatttcataaaacttttggatgtgtggacttatgagttgccaagagatacatgtttgtcatattctcctatccttcaaaatctagtttatgaattttcttatttttatctaagtatttgtaaagacgctgtttcaaacaagcagctcatgacaaaactacaggaatccaagtttgatgttcttttcgcagatcctgtggcttcctgtggggatctgatagctgaactgctccacattccttttctgtacagtcttagcttctctccaggccacaaacttgaaaagtccattggaaaatttatactccctccatcttatgtgcctgtaattttgtcgggactggctggcaaaatgacattcatagacagggtaaaaaatatgatatgtatgctttatttcgacttttggttcgagagacttagacacaaggaatgggacacgttttacagtgagattttgggaaggcccaccaccgtagatgagacaatgagcaaagtagaaatatggcttattagatcctattgggatttgaaatttccccacccaacattaccaaatgttgactatattggaggactccattgcaaacctgctaaacccttgcctaaggatatggaagaatttgtccagagctctggagagcacggtgtggtggtgttttctctggggtcaatggtcagcaacatgacagaagaaaaggccaacgcaattgcatgggcccttgcccagattccacaaaaggttctttggaaatttgatggcaaaaccccagcaacattaggacccaataccagagtctacaagtggctcccgcagaatgacctcctgggtcacccaaaaaccaaagcctttgtaactcatggtggagccaatggcctctatgaggcaatctatcatggaatccctatgattggcattcctctgtttggagatcaacctgataatattgcccacatggtggccaaaggagcagctgtttcattgaatatcaggacaatgtcaaagttagattttctcagtgcactggaggaagtcatagacaatccgttctataaaaaaaatgttatgttgttgtcaaccattcaccatgaccagcctatgaagcccctggacagagctgtcttctggattgagtttatcatgcgccacaaaggggccaagcacctgagaccacttggacataaccttccctggtaccagtaccactctctggatgtgattggattcctgctcacctgttttgcagtcattgcagctcttactgtaaaatgtctcttgttcatgtaccgattctttgtaaagaaggaaaagaaaatgaagaatgagtagagctcattgacaatgcactacagaaatgaaatttcagcgtcattctaatttatgaaccaccttctaaaaattactaattttttatcaaggtagataacctttgtaggaagacatataactccgtgaatactgatatgtactcaaaaatccatcatttttaaattttaaaaccacttaatgtaaaagttacattgtagaaaaatgtgcagaataaaattattcttgatagagtccaaataatcaaagtattaaccttaaaatatttgaatagtgtccattagcttctttgtctaatactgaatctgtagctttcatacaataaaatgtagataacttgtacacgataaatactggcatataattttttttctgtaatagacctaattacttgttgtctgggataaagtgtggttagtttggatatcagttttaaaggaatctgttggctcttttgttcctctaacataatatgctaacatagagcatctcaagggaaaagcagaacagtttatttggagttgtgaccacagttccttaaaatgtagagtagcggagaaggcagggcagcagtcatccagaggaggaagctcacttgtcacatctcaaccatatatggaaagcagagagtgagcaagaagtagggctaagctatgaactttcaaagcttagtcgagtgacgtacttcatccaaaaagctttaaccactttaattaagattccataacctcaatctgcactacaaattttggaaaatgtgctcaagttcataaacctatctgaaacattttacattcaaaccaataacaggaaatcattctgtttcttaacttttttagcacaccttatgctgttaacattctagtcctccaagttctaacacaccaccatagaacacctgtacttcttcagtatactttaactatgatcatgaggaataatgttcattggaaatgaaacttatgaacagggaacaaattgaagccctaaataaagtaaacttagtattgag

SEQ ID NO: 170 - DNA, 1377 bp, Rattus norvegicus (Norway rat)
gttcgggattcacacatacacttcagaatgccgggtctaagttgtagattttatcaacacaaatttcctgaggtcgaagatgtagtgatggtgaatgtaagatccattgctgaaatgggggcctatgtcagcttgttggaatataataacattgaaggcatgattcttcttagtgaattatccagacgacgtatccgttctataaacaaactgatccgaattggcagaaatgaatgtgtagttgtcattagagtggataaagaaaaaggatatatagatttgtcaaaaagaagagtttctccagaggaagcaatcaaatgtgaagacaaattcacaaaatccaaaactgtttatagcattcttcgccatgttgctgaggtattagagtataccaaggatgagcagctggaaagcctattccagaggactgcctgggtctttgatgacaagtacaagagacctggatatggtgcctatgatgcctttaagcatgcagtctcagacccatctatcttggatagtttagatttgaatgaagatgaaagagaagtactcattaacaatatcaataggcgtttgaccccacaagctgtcaagattcgagcagatattgaggtagcttgctatggttacgaaggcattgatgctgtaaaagaagccctgagagcaggtttgaattgttctacagaaaccatgcccatcaagattaatctaatagctccacccaggtatgtgatgacaacaacgaccctagagaggacagaaggactctctgttctcaatcaggctatggcagtcatcaaagaaaagattgaggagaagaggggagtgttcaatgttcagatggagcccaaagtggttacagatacagatgagactgaacttgcaaggcagctggaacggcttgagagagaaaatgcagaagtggatggagatgatgatgcagaagaaatggaagccaaagctgaagattaaccttttggaaaacagtccaatttaaggagtacgaagcagccctttctggctgtaaaccctagacttgaaagttttccagtattgaaaacttcaaagctgaatatttttatttccaagtatttaagtattcgacaagccagaatctaaatgccctccttcatgtcagctgttttcacatagtggctctaacacctcaagcgtttttaagggagtggcttgatttgaccagagacaaatgttaaaccgcagtcctaaaattgggcttgcggttttcatttctgatgtctctggattggcacccttatggtttagagaattaccaggggctccagacaccaacaatcccaacctttctatataaaatgtactcaagcaaacatcaaataaatttctgggatattt

SEQ ID NO: 171 - DNA, 1501 bp, Rattus norvegicus (Norway rat)
cagggtcgtcctggcaaccagctgctcagccaatcagcgcttgacactacgatccgcccccaacttctggagccatggcggtgagaagagccctgattgtattggcccacgcagagaggacatcattcaactatgccatgaaggaggctgctgtggaggctctgaagaagaaaggatgggaggtggtcgaatctgacctctatgctatgaactttaaccccctcatttccagaaacgacatcacaggggagccgaaggactcggagaactttcagtaccctgttgagtcatctctggcgtataaggaaggccgcctgagcccggatattgtagctgaacagaaaaagctggaagctgcagacctggtgatatttcagttcccattgtattggtttggggtgcccgccattctgaaaggctggtttgagagagtgcttgtagcaggattcgcctacacgtatgccaccatgtatgacaagggtcctttccagaataagaagaccttgctttccatcaccaccgggggcagcggctccatgtactctctgcagggtgtccacggggacatgaacgtcattctctggccaattcagagtggcattctgcgcttctgtggcttccaggtcttagaacctcaactggtgtacagcattggccacaccccacccgatgcccgcgtgcaggtcctggaagggtggaagaagcgtctggagactgtctgggaggagtcaccactctactttgctccaagcagcttgtttgacctaaacttccaggcaggattcttactgaaaaaagaggttcaagaggagcagaaaaagaacaagtttggcctttctgtgggccatcatttgggcaagtccattccagccgacaaccagatcaaagctagaaaataaggttttccataccatgtagttagacccaggtttctttttccccagcttgcctggcttgctttcagttttcgcctttgttccacaaggataggaaaaggaggaggctcgcctcatgcgtttttggatagttctgccacggcgtgtgacagcaaaatgaacgaggtcagattaggggcctcaggtggcctgggatatgaatcagggagaggtgtagccgcgagcggggaaaatactcttctaggtcttttgtacactataagcttttttcttcgggctagcctggctaaatggcatccaatcctccacccacttgttgctattagttacctctctgtggtttagggcaggagggaattgctcaaacaatggctgagggactaacttgtttagcagttagctaaagcctgtttatgatccatcctggtttcaattactgtgcagtgactgacaagcctcgggggattgctctccagctcttctctgccttgtacatagcacacccaggtcctgggaaatgaatacaaaaacaggtctccgcctcattcttgctattctttctttgtgtgtgtgtgtgtggaaataaatggatatttcacacgtca

SEQ ID NO: 172 - DNA, 948 bp, Rattus norvegicus (Norway rat)
aacagctagcggagcggcaggaggagcactaaccaggaaaatggcagacggcttctcacttaatgatgccttagctggctctggaaacccaaaccctcgaggatggcctggtgcatgggggaaccagcctggggcaggaggctacccaggggcctcctatcctggggcctacccaggacaggctcctccagggggttatcctggacaggctcctcctagtgcctatccgggcccaactggccctagtgcttatcctggcccaactgcccctggagcttatcctggcccaactgcccccggagccttcccagggcaacctgggggacctggagcctaccccagtgctcctggggcctaccccagtgctcctggggcctatcctgctactggcccctttggtgccccgactggaccactgacagtgccctacgatatgcccttgcctggaggagtcatgcctcgcatgctgatcacaatcataggcacagtgaagcccaacgcaaacagtatcactctgaatttcaagaaagggaacgacatcgccttccactttaacccccgcttcaatgagaacaacagaagagtcatcgtgtgcaacacgaagcaggacaataactggggaagggaagaaagacagtcagctttcccctttgagagcggcaaaccattcaaaatacaggtcctggttgaagccgaccacttcaaggttgcggtcaatgatgttcatctgttgcagtataaccatcggatgaagaacctcagggaaatcagccaactggggatcattggtgacataaccctcaccagcgcttcccacgccatgatctaagccagaaggggtgggccggcaccagaactgccctgtgtgttatgagcgggaaactttgcatttctctctccttatacttcttgtaagacatccatttaataaagtctcgtgctgagaga

SEQ ID NO: 173 - DNA, 1671 bp, Rattus norvegicus (Norway rat)
cctttctttgcgagaagtgcaaaattggctagagccagagtctcgcccacctggtacagaaggagcgcgcgcctgtgtcccttggggacccacagttgcaaagagacagctgcttgatttggtcacccactcgcccagactataggagcctcccgggacactcttgagttgcacctttctgcagagcagactgtttgagcccccgcagtgctcgtaggatttgaagcgttctgatactggaggcttgctcgccgcgctcgcccgactctgggacacatttgtccgagccacaggagtgtgcgggtgactgacatatcatctcttcgactctccatgagctcatgaacctgggagcaggtgcccggaaatggcgcggcctctgagcgacaggaccccgggccccctgctgctgggtggcccggctggggccccccctggcgggggagcgctgcttgggctgaggagccttctgcagggaaacagcaagcccaaagaaccggccagctgtctcctgaaggaaaaggagcgcaaggcaactctgccctcagcccccgtcccgggacccgtcctggaaacggcgggcccagcggatgccccaactggggcggttagtggcggtgggtcccctcgggggcgctcagggcctgtggctggcccgagtctttttgcgccgctgctgtgggaacgcactttgcctttcggggacgtggaatacgtggacctggacgccttcttgctggagcacgggctaccgccgagcccgccgccccccgggggcctgtcgccggcaccctctccagcgcgcactcccgcgccctcccccgggcccggctcttgcagctcctcttccccccgctcctcgcccgggcacgcccccgcgcgggccactctgggagccgccggcggccaccgcgcaggcttgacctctagggacacacccagtcctgtggacccagacaccgtggaggtgctaatgacctttgaacctgatccggctgatcttgccctgtcaagcattccaggccatgagacttttgaccctcggaggcaccgcttctcagaggaggaattgaagcctcagccaatcatgaagaaggcaaggaaagtccaggtgcccgaggaacagaaggatgagaagtactggagccggaggtacaagaacaatgaagcagccaagaggtcgagagacgcaagaagactcaaggagaaccagatatctgtgcgggcagccttcctggagaaggaaaacgccctattgcggcaggaggtggtggctgtgcggcaggagctgtcccactaccgtgctgtgctttcacgctaccaggcccaacacgggacactgtgaggccacttccaccctgccagggcagagtcctgttccttgttcagacttacacctgacaccccccttcctccttgtcccatggccaatggtctggccagctaggtgcccaggaacgtcatgatgcagacaaatacatttatatttttaagaaaaagctagccttcccccacctcccttgtgggggtggggagggtcctgtgtgcacttttagcatgtcgaggaacccatccatccaaccgcctccatcaacacaatcctgaataaatcttgagaacccaaaaaaaaaaaaaaaaaaaaaaaaaaaaaaaaaaaaaaaaaaagaattc

SEQ ID NO: 174 - DNA, 2415 bp, Rattus norvegicus (Norway rat)
cacggcgctccttagggccaccgctcggcgcgccgggacagaccctccccactcctgcctgcaggatcggaacgtcaattaacggctgacactgccccccacctcttcccacccatctgggctccagcgaggaacggatctcggggtacaccatgatcttgccatttttagtactggccatcggaccctgccttaccaactcatttgtgccagagaaagagaaagaccccagttactggcgacagcaagcccaagagaccttgaaaaatgccctgaaactccaaaaactcaacaccaacgtggccaagaacatcatcatgttcctgggagatggtatgggcgtctccacagtgacagctgcccgcatccttaagggccagctacaccacaacacgggcgaggagacacggctggagatggacaagttcccctttgtggctctctccaagacgtacaacaccaacgctcaggtccccgacagcgcgggcactgccactgcctacttgtgtggcgtgaaggccaacgagggcaccgtgggagtgagcgcggccactgagcgcacgcgatgcaacaccactcaggggaacgaggtcacgtccatcctgcgctgggccaaggatgctgggaagtccgtgggcatcgtgaccaccactcgggtgaaccacgccactcccagtgcagcctatgcgcactcggccgatcgggactggtactcggacaatgagatgcgcccagaggctctgagccagggctgcaaggacatcgcctatcagctaatgcacaacatcaaggacatcgatgtgatcatgggtggtggccggaagtacatgtaccccaagaacagaactgatgtggaatatgaactggatgagaaggccaggggcaccagactggatggcctggacctcatcagcatttggaagagcttcaaacctagacacaagcactcccactatgtctggaaccgcactgaactgctggcccttgacccctccagggtggactacctcttaggtctctttgagcccggggacatgcagtatgagttgaatcggaacaacctgactgacccttccctctcggagatggtggaggtggccctccggatcctgacaaagaatcccaaaggcttcttcttgctagtggaaggaggcaggattgaccacgggcaccatgaaggcaaggccaagcaggcgctgcatgaggccgtggagatggatgaggccatcggaaaggcgggcaccatgacttcccagaaagacacgttgactgtggttactgctgatcactcccacgttttcacgtttggtggctacacccccaggggcaactccatttttggtctggctcccatggtgagcgacacggacaagaagcccttcacagccatcctgtatggcaacgggcctggttacaaggtggtggacggtgaacgggagaacgtctccatggtggattatgctcacaacaactaccaggcccagtccgctgtccccctgcggcacgagacccacggtggggaagatgtggcggtctttgccaagggccctatggctcacctgcttcacggcgtccatgagcagaactacatcccccacgtcatggcgtatgcctcctgcattggagccaaccttgaccactgtgcctgggccagctctgcgagcagcccctccccaggggccctgctgcttccactggctctgttccccctacgcaccctgttctgagggcccaggtcccacaagagcccacaatggacagccggctcccctccctttgtggcctgccacctggccgcccacactcaacggggaggcccaggcaacctcgagcaggaacagaagtttgctacctgcctcacttccgcccggaaccctccgtgggtcggattcctggctctgccgttgtttctctattcactgccttttggccagcagggtgggtttctctcttgggccggcaggacacagactgcgcagattcccaaagcaccttatttttctaccaaatatactctccagaccctgcaaccatcatggaacattccagatctgaccttctctcccctaccccttctctctggaacactgggtcccatagtcacagccagtccctcaacccaaccctccttggagggaagaccaggtctgctcagggtgagactcccaggaagccacctccggggttggctgtctacccagggtggccaggctgggaagaacaacccagccggacaggacgcacacactccccacccagctccagagactcgccaacccttcactgaagcgactcccctgtttggaatagcaaaaaaaaaaagaaagaaaaaaaagaaaaaaattttaatttctctttttggtgttggttaaaagggaacacaagacatttaaataaaatgttccaaataaaaaa

SEQ ID NO: 175 - DNA, 1232 bp, Rattus norvegicus (Norway rat)
gttttccgtccggcttctctcacactcaagtgcgcgcctccacctcatggaagactcgatggacatggacatgagccctcttaggcctcagaactaccttttcggttgtgaactaaaggctgacaaagattatcactttaaagtggataatgatgaaaatgagcaccagttatcattaagaacggtcagtttaggagcaggggcaaaagatgagttgcacatcgtagaggcagaagcaatgaactatgaaggcagcccaattaaagtaacactggcaactttgaaaatgtctgtacaaccaacagtttcccttgggggcttcgaaattacaccacctgtggtcttgaggttgaagtgtggttctgggcctgtgcacataagtggacagcacctagtagctgtagaggaagatgcagagtcagaagatgaagatgaggaagatgtaaaactcttaggcatgtctggaaagagatctgctcccggaggtggtaacaaagtcccacagaaaaaagtaaaacttgatgaagatgatgatgaggatgatgaagatgatgaggatgatgaagatgatgatgatgatgattttgatgaagaggaaactgaagaaaaggttccagtgaagaaatctgtacgagataccccagccaaaaatgcacaaaaatcaaaccaaaatgggaaagatttaaaaccatcaacaccaaggtcaaagggtcaagagtccttcaaaaaacaggaaaaaactcccaaaacacccaaaggacctagctctgtagaagacattaaggcaaaaatgcaagcaagtatagaaaaaggtggttctcttcccaaagtggaagccaagttcattaattatgtgaagaattgtttccggatgactgaccaggaggctattcaagatctctggcagtggaggaagtctctttaagaaaatggtttaaacagtttgaaataattctgtcttcatttctgtaatagttgctatctggctgtcctttttataatgcaaagtgagaactttccctactgtgtttgataaatgttgtccaggttcaattgccaagaatgtgttgtctaaaatgcctgtttagttttcaaggatggaactccgccctttacttggttttaagtatgtatggaatgttatgataggacatagtagtagtggtggtcagatgtggaaatggtagggagacaaatatacatgtgaaataaactcagtattttaataaagt

SEQ ID NO: 176 - DNA, 2259 bp, Rattus norvegicus (Norway rat)
ctggctactatgctggacacaggactgctcctggtggtcatactggcctccctaagtgtcatgttcttggtgtccctctggcagcagaaaatcagggagagattgcctccaggacccactcctttgcctttcattggaaattatctgcagctgaatatgaaagacgtatacagttccatcacacagctcagtgagcgctatggtcctgtgttcaccattcaccttgggcctcgacggattgttgtgctttatggatacgatgcagtcaaagaggctttggtggaccaagctgaggagttcagtggacgtggcgaactgcctacctttaatatactcttcaaaggctatggtttttcattgagcaatgtggaacaggccaagcgtatcaggcgcttcaccatagccacattgagagattttggtgtgggcaagcgtgatgtacaggagtgtatcctggaggaggcaggctatttgatcaagacgttgcagggcacttgtggagcccccattgacccttccatctacctgagcaaaacagtctccaatgtcattaactccattgtcttcgggaaccgcttcgactatgaggacaaagagttcttgtcactgttggagatgatcgatgaaatgaatatatttgcagcctcagccacagggcagctctatgacatgttccattcagtgatgaagtacctgcctggaccacagcaacagatcatcaaggttactcagaaactggaagacttcatgatagagaaagtgaggcagaaccatagtaccctggaccccaattccccaaggaacttcattgactcctttctcatccgcatgcaagaggagaaatatgttaattcagaattccacatgaacaacctagtgatgtcatcattaggcctcctctttgctgggactgggtcagtcagctccacgctataccatggtttcctgctactcatgaagcatccagatgtggaagccaaggtccatgaggaaattgagcgagtgatcggcaggaaccgacagcctcagtatgaggaccacatgaagatgccctacacccaggctgtgatcaatgagatccaaagattttctaacttggctcccttgggcattcctcgaaggattatcaagaacacaaccttccgtggcttcttcctccccaagggcaccgatgtattccctataataggttctctgatgacagaaccaaagttcttccctaaccacaaagacttcaacccccagcacttcctggatgacaagggacagttgaagaagaatgctgcatttctccctttttccattggaaagcgattctgcttgggagatagcctggctaaaatggagctcttcctgctgctcaccaccatcttgcagaacttccgttttaagttcccaatgaatctagaagacatcaacgagtaccccagtcccatagggtttaccaggatcataccaaattacaccatgagcttcatgcccatctgattctgagttgaatcaaggtggggcaagagggagggagagcctgaagtggggccagggtgcaggtggagagaacagagaagatgaagatgagggttaagaagggaccacacccatggaagaaacacaaaagacttctcagtttggtaaaattgtaacagtcctaataaaaagaaagaaacacccagtaggcagcagtaacaacaactgagactcatggggcaaaggtggctcacctctgcagaagctgtcctgcccttctctcactcagtcctctacacaagagcagcatgtccccaagcccaacgtacaggttcaaaagatagaacttaaaaaatttgaacctaaactgaggtggaaaagacacagttagctaggattgacacattggactctatcaccagcattcaggagggagggaacatggctccctaggaggcctgccagaattacaaagtgaaactcatctcaaaaaaggaacaacagaaaataaaatttcaaattgatttctcttagaccataagagtccagatctgtatccaaagctatttggttatattttttgttattgttgttttgtttacacattgtgtttttctttcggtttgtaagtctgtttgggatatttaatttacatttactgattagtgtgggtggtagggcataccatggctcaaatgtggaaaccaaagaaaagcttttggaagtgtcatctcccttacaatacgtgtgtccaagaactcaaattcagacaataaagcttgatagcaagca

SEQ ID NO: 177 - DNA, 2153 bp, Rattus norvegicus (Norway rat)
cggccgggtgcgccttggggtttagtggcggcttctccatgggtccagccagccgcttccctgtgctgtgaggagacagcattcagagttgaccttgtgagagctggccataatttaattccatctctaggttttctgtaggcacatcgagaaccaaccatgggcagctttactaaggaagagtttgactgccatatcctcgatgaaggtttcactgctaaggacattctggaccaaaaaatcaatgaagtttcttcctctgatgataaggatgctttctatgttgcggacctcggagacgttctaaagaagcatctgaggtggctgaaagctcttccccgtgttactcccttctatgctgtcaagtgtaatgacagcagagccatagtgagcaccctggctgccattgggacaggatttgattgtgcaagcaagactgaaatacagttggtgcaggggcttggggtgcctccagagaggattatctatgcaaatccttgtaagcaagtgtctcagatcaagtatgctgccagtaatggagtccagatgatgacttttgacagtgaaattgagttgatgaaagttgccagagcacatccaaaggcaaagttggttttgcggattgccactgatgattccaaagcagtttgtcggctcagtgttaagtttggtgccacactgaaaaccagcaggcttctcttggaacgggcaaaagagctaaatattgatgtcattggtgtcagcttccatgtgggcagtgggtgtactgaccctgagaccttcgtgcaggcagtgtcagatgcccgctgtgtctttgacatgggaacagaagttggtttcagcatgtatctgcttgacattggtggtggctttcctgggtctgaagacacgaagcttaaatttgaggagatcaccagtgtaatcaacccagctctggacaagtacttcccatcggactctggagtgagaatcatagctgagccaggcagatactacgtcgcatcagctttcacacttgcagtgaatatcattgccaaaaaaaccgtgtggaaggagcagaccggctcggacgatgaagatgagtcaaacgagcaaactttgatgtattacgtgaatgatggagtgtatgggtcatttaactgcattctttatgaccatgcacatgtgaaggccctgctgcagaagagacccaagccagatgagaagtattactcatccagcatctggggaccaacatgtgatggccttgatcggatcgtcgagcgctgtagcctgcctgaaatgcatgtgggtgattggatgctgtttgagaacatgggtgcatacactgttgctgctgcttctactttcaatgggttccagaggccaaacatctactacgtaatgtcacggtcaatgtggcaactcatgaagcaaatccagagccatggcttcccgccagaagtggaggagcaggatgttggcactctgcccatgtcttgtgcccaggagagcgggatggaccgtcaccctgcagcctgtgcttctgctagtatcaatgtatagatgccattcttgtagctcttacctgcaagtttagcttgagttcacggcatttggggggaccatttaacttaattactgctagtttggaatgtctttgtaagagtagggttggcaccaatgcagtatggaaagactaggagatgggggtcacacttactgtgttcctatggaaactttgaatattttatatggatttttattcacttttcagacctgatactaatgagtgcccctcggctgctgagcaagcatttgtagcttgtacattggcagaatgggctaaaagcttatgttgtgacccattttgaaaataaagtatcttgaaatgattggacattggagaatgtgtgcaagtatcccttacagaaggcacaaacttctgcacaggctgtgtgttacagcagtgagtctagcccagcagagatgtggatgatacaaagctgtgccccctctgtacagcatcaatgtgcttagcccatctcaagtgtttactgtgaacttggtgcccaaagtctcttaagagtgtcatctgcctagtggcctcttgacttggccacttcctaaggagagggcatctgaggctctttgaaccttgcctgcagaaaccc

SEQ ID NO: 178 - DNA, 1164 bp, Rattus norvegicus (Norway rat)
gtgtctgttctgcggaacagtaggcagttgttttccgtccggcttctctcacactcaagtgcgcgcctccacctcatggaagactcgatggacatggacatgagccctcttaggcctcagaactaccttttcggttgtgaactaaaggctgacaaagattatcactttaaagtggataatgatgaaaatgagcaccagttatcattaagaacggtcagtttaggagcaggggcaaaagatgagttgcacatcgtagaggcagaagcaatgaactatgaaggcagcccaattaaagtaacactggcaactttgaaaatgtctgtacaaccaacagtttcccttgggggcttcgaaattacaccacctgtggtcttgaggttgaagtgtggttctgggcctgtgcacataagtggacagcacctagtagctgtagaggaagatgcagagtcagaagatgaagatgaggaagatgtaaaactcttaggcatgtctggaaagagatctgctcccggaggtggtaacaaagtcccacagaaaaaagtaaaacttgatgaagatgatgatgaggatgatgaagatgatgaggatgatgaagatgatgatgatgatgattttgatgaagaggaaactgaagaaaaggttccagtgaagaaatctgtacgagataccccagccaaaaatgcacaaaaatcaaaccaaaatgggaaagatttaaaaccatcaacaccaaggtcaaagggtcaagagtccttcaaaaaacaggaaaaaactcccaaaacacccaaaggacctagctctgtagaagacattaaggcaaaaatgcaagcaagtatagaaaaagcgcattgaacattcctgggcactactggtaaattaagcccaaagatggggaaagaggaaaaggagaaacaaatatagtaccatcaacaatccagactgaagtcttctattttaatctcaatcccctttcctgattggccatccattcccccttgcaggctggaagcaatcgaaaacctaaagcatttttctttttcactcgggtgatgcagaaaacttgactgcttttctataccacttgtgcatatgccttaactctgaccatgttttaattttaacctttgtatccttagctgctcgaaataaatttttgaatgaaccaat

SEQ ID NO: 179 - DNA, 2470 bp, Rattus norvegicus (Norway rat)
acctcagctatggagttggatgagctgtgcctgctcgacatgctggtctacttggaaggtttcatggccttcgtgtccattgtggggctccggtcggttggctctccgtacggccgctactcgccgcagtggcccggcatccgagtgcccgcgcgacctgcctggttcatacaggagctgccctcgatggcctggccgctgtacgagtacattcgtcctgcagccgcgcgactgggcaacctgcctaaccgcgtcctgctggctatgtttctgatccactacgtgcaaaggacgctggttttcccggttctgatcaggggagggaagcccaccctcctggtcacctttgtcttggccttcctgttctgcaccttcaacggctatgtacagagcagatacttgagccagtttgcggtttatgctgaagactgggtgacccatccctgtttcctgacaggctttgccctgtggttagtgggcatggtgataaatatccactcagaccacatcctgaggaatctgagaaaaccaggggaaactggatacaagatacccaggggaggcctgtttgaatacgtatctgcagccaactattttggggagctcgtggagtggtgtggctttgcactggccagctggtccctccagggtgtagtgtttgcactgttcacactcagcacactgctcaccagagcgaagcagcaccatcagtggtaccatgagaagtttgaagattaccccaagtcaagaaaaatactgattccatttgtgctttagtgctctgttagcgctgttgcctcccatgagctgagtctgtctgtctccctggtgactttgctctgagcacttacgaatgaattgttttccttaattctcctgcagcccctttctcaggaaaggctgggggtgggggggtgtcgtcccctggtaaaggacaaagccaatgataaactaatccaccacatgcagttaggggctacactgcctgctggatccgaagcaggtagccctgagtcattatggcgctctctgacttcagcaatcagcagcccttacaatcctgcaagattccacccaagtcagcagcagtcacgggcctccttcactgatgtgtgttctgcctgctcagcccctgccacagaggcctggaggtgtgggagtgtggcctaagcacagtctgccatccttgaccgcagacctcttggacccacccccactccctccagacactggtaagagaagccttcctgcaacatgtcctgtcctcaggaggtgagacagcagagtgcttccattcactcgatgaccccatttttgctcttcctttgggctagaattcattaaggtccttaaaaacaaaacaaaactttttcttaatagtacaaaacaaaatatcaaaacaaaatttgttattttgaatgcacccaaggaccaatcatgtcacacaaagaaagctcagggctagcctgggctgtgtagggagaccctgtttgggaaaaaaaaaatgaagataacaaccagctaactgtccaaagaagtgaccgcagtaataaaagacgccgcccacacaggcaccagcttgggagaaagatgtgcgcctgggattgtaaacccactgttgctctgggcaggctgaggcccactggtgaagagccattcccaccggacccatgcacactgcctcggggcagcgtctgcactcacctctcacccgctgccaccacagctaaagaacagaacggatagaactgtgtgctctgaacccagtgaagatgctgcatgaagacctgcaggcacacctgatggcgtgcacggtgcccaccactcgcctgactcggaccatctctgtgtgcccgctgccacctctgtgtgccctttccagctggctttcccatcagggcttcctcagctcttctgctctcagacagaaactattctctgttcctctggttcgcagaatgtctagatttgacccagaaaacttcatgacacagctacttcattttaacaaagagcagtgtttaatggggaactacccttcaatcctttaccctccccttttctggccaagtaactgcttgaaaacctaaagcactaaacattgtaggtctcctctcaaaacctcaggcctgtctggtgtgttctgaaacgtttgtgtggaaggagatattcagctgagaccctgggaatgtttgctgtgaacttgacctcccttggagggcatggtgctagataaacttggaacctaggactccaggttgctaggcggatgccctgacactaagccacatcacacattagctctgtgatgcctctttctttatgaaggaccaagctgcccacatactaagtgagattaatttaagaggaatcctgtcctaacactgtatacttcattccctacaactcaacttacttgtatgaaccatgattgttaaggaaattaataaactacatttataagtaaaaa

SEQ ID NO: 180 - DNA, 781 bp, Rattus norvegicus (Norway rat)
tgtggatctttccagaacagcagttgcaatcactatgtctcaatcctgggtacccgccgtgggcctcactctggtgcccagcctggggggcttcatgggagcctactttgtgcgtggtgagggcctccgctggtatgctagcttgcagaaaccctcctggcatccgcctcgctggacactcgctcccatctggggcacactgtattcggccatggggtatggctcctacataatctggaaagagctgggaggtttcacagaggaggctatggttcccttgggtctctacactggtcagctggctctgaactgggcatggccccccatcttctttggtgcccggcagatgggctgggctttggtggacctcatgcttgtcagtggggtggcaaccgccactaccctggcttggcaccgagtgagcccaccggctgcccgcttgctgtatccttacctggcctggctggcctttgccaccatgctcaactactatgtatggcgtgataactctggtcggcgagggggctcccggctcacagagtgaggacacctagccatcaggaatgcagccctgccagccaggcatcatgggttgaggtcatcctgctttcatgaccattgggcctgctggtctacctggtcttagtccaggaagccaccaggtaggtcaaggtggtcagtgctaagtcccatgcggggacagttgtacctgcttttctgcactgctgcaggcgtgccctaggagcatggggcctttaaagctaaataaagtctttaactt

SEQ ID NO: 181 - DNA, 4057 bp, Rattus norvegicus (Norway rat)
aaaagagttgggagaagttgggagcggcgggggcgcgccccggggtgggcaccgggaaatcgtcgggagcgcgcgagggttccggaggatcaggggagacccggagacccccgggacacgaaatctagagctagcgggttatgcctccaccttgttgccctgaaagccgaagcgacagtgagaagggctaagatttggccatgagcagcgcccccaggcgccccgcctcgggcgcagattctttgcacacgccagagccagagagcctgagccccggaacacctgggttccctgagcaagaggaggaagatgaacttcgtaccttaggtgtggagcggttcgaggagatcctccaggaagctggatccagaggaggagaagagccaggccgcagctatggggaggaagactttgaataccaccgccagtcctcccaccatatccatcatccactctccacccacctgcctcctgacgcccgccgtcgcaagactccccagggcccaggacggaaacctcggaggcgccctggagcctctcccactggagagacccccactattgaggaaggggaggaagatgaggatgaagtcggtgaagctgaagggttcagagctcccccgcaacaaccatctcctgcctcttcaccctctgcagttcagttttttctccaagaggatgaaggtacagataggaaggcagagagaaccagcccatctccccctacacagacgccccaccaggaagcagctccccgggccagcaaaggggcacagacaggaactctggtggaggagatggtggccgtggccagcggcacggctggaggtgacgacggaggtgctgcagggcgccccctgaccaaagcccagcctggacatcgaagttacaaccttcaggagagaaggcgaattggcagtatgacaggggtggagcaggccctgctgcccagggtccctactgatgagagtgaggctcagacgctggccacagctgacctcgacctcatgaaaagtcaccggtttgaggacgttccgggggtacggcgacatttggtgaggaagaatgccaaagggtctacacaggctgcccgggaaggccgagagcctggccccacacctcgggcacgaccacgggccccccataagcctcatgaggtgttcgtagagctgaatgaattgcagttggacaaaaaccaggagcctcagtggcgggagacagcccggtggataaaatttgaggaggacgtggaagaggagactgagcgctggggcaagcctcacgtggcatcactgtccttccgcagcctcctggagctccgcaggacactggcccatggagctgtgctcttggacctcgatcagcagaccctgcctggggtggcccatcaggtggtcgagcagatggttatctctgaccagatcaaagcagaggacagagccaatgtgctacgagcccttctgctgaaacacagccacccaagtgatgagaaagaattctccttcccccggaacatctcagcgggctctctgggctctctcctggggcatcaccacgcccaggggactgagagtgatcctcacgtcactgagcctctcatcggtggtgttcctgagacccggctggaggtggatagagagcgtgagctgccgcccccagccccacctgcaggtattacccgctccaagtccaagcatgagctgaagctgctggagaagatccctgagaatgcagaggccacagtggtcctcgtgggctgtgtggagttcctctcccgccccaccatggcctttgtgcgcctgcgggaggctgtggaactggatgcagtactggaggtgcctgtgcctgtgcgcttcctcttcctgctgctggggcccagcagcgccaacatggactaccatgagattggccgatccatctccaccctcatgtctgacaagcaattccacgaggcagcctacctggcagatgaacgggatgacttgctgactgctatcaatgccttcctggactgcagtgttgtgctaccgccttctgaagtgcagggcgaggagctgctgcgttctgttgcccatttccagcgccagatgctaaagaagcgagaggagcagggccgcctgctgccccctggtgctgggctagagcccaagtctgcccaagataaggcactcctgcagatggtagaggtggcaggtgcagctgaagatgatccccttcggaggacaggccggccctttggggggctgatccgtgacgtgcggcggcgctacccgcactacctgagtgacttccgagatgcactagacccccagtgcctggctgctgtcattttcatctactttgccgccctgtcgcctgccatcacttttggggggctactgggggagaagacacaggacctgataggagtgtcagagctgatcatgtccacagcgctccagggagtgatcttctgcctgctgggcgcccagccactgctggtgatcggcttctcggggcctctgctggtcttcgaggaggccttcttctcgttctgcaagagcaaccagttggagtacttggtgggccgagtttggattggcttctggctggtgctcctggccctgctcatggtggctctggaggggagcttcctggtccgctttgtctcccgattcacccaggagatctttgccttcctcatatcactcatcttcatctatgagaccttctataagctgatcaagatctttcaggagcaccccctccatggctgctcagtctccaacgactcagaggcagacagcagcagtaacaatatgacttgggcagcaaccacactggcaccagacaacagcagtgcgtctgggcaggagaggccccggggccagcctaacactgccttgctatcactggtgctgatggccggcactttcttcatcgccttcttcctgcgcaaattcaagaacagccggttcttccctggccggatccggcgggtaattggggactttggggtgcccatcgcgatcctcatcatggtgcttgtggattacagtattgaggatacctacacccagaagctaagtgtgcccagtgggttctcagtgacagccccagacaagcggggctgggtcatcaacccccttggagagaagactcctttccctgtgtggatgatggtggccagcctgttgcctgccgttctggtgttcatcctcatcttcatggagacacagatcaccacgttgatcatctccaagaaagagcggatgcttcagaagggctctggcttccaccttgatctgttgctcattgtagccatgggtggcatctgtgccctctttggcctgccttggttggctgctgccactgtccgctctgtcactcatgccaatgcactcactgtcatgagcaaggctgtggcacctggtgacaaacccaagattcaggaagtcaaggagcagcgggtgaccgggctgctggtggccctgcttgtgggactctccatggtcattggggacctactgcggcagatccccctggctgtgctctttggcattttcttatacatgggagttacttcccttaatgggatccaattctacgagcggttgcacctgctactcatgccgcccaaacaccacccagatgttacctatgtcaagaaggttcggaccatgcggatgcacctgttcactgccttgcagctgctctgtctggccctgctttgggcggtcatgtccacagctgcttccctggccttccccttcatcctcatcctcacagtgcctttgcgcatggtggtacttacccggatcttcactgagcgagaaatgaaatgtctggatgctaatgaggcagagccagtgtttgatgagtgtgaaggtgtggacgagtacaacgagatgcccatgcctgtgtagctgctgtccagaggcatagcagagggactaaggggcaggggctggggggctggggagctggggctcccctcctcctgtccctcctcatttttatttaagtgaataatttaaagcccccttgtccccaccctgcagtaaagtgcttcaacccc

SEQ ID NO: 182 - DNA, 4269 bp, Rattus norvegicus (Norway rat)
taagctggtgcttacggacagagagccacactcgggctttctcgaagaggtaaaccaggtccctctgcagccatgtcagccaaggcaatttcagagcagaccggcaaagaactcctttacaagtacatctgtaccacctcagccatccagaaccggttcaagtatgcccgggttactcccgacacagactgggcccatctcctgcaggaccacccctggctgcttagccagagcttggtagtcaagccggaccagctgatcaaacgtcgaggaaagcttggtctagtcggggtcaacctctctctggatggagtcaaatcctggctgaaacctcgactgggacatgaggccaccgtcggcaaggccaaaggcttcctcaagaactttctgattgagcccttcgtcccccacagtcaggcggaggagttctacgtgtgcatctatgctacccgggaaggagactacgtcctgttccaccatgaagggggtgtggatgtgggcgatgtggacaccaaagcccagaagctgcttgtgggtgtggacgagaaactgaacgctgaagacattaagagacacctgttggtccacgcccccgaagacaagaaagaaatcctggccagcttcatctccggcctattcaatttctacgaagatctttacttcacctaccttgagatcaacccccttgtggtgaccaaagatggtgtctacatccttgacctggcggccaaggtggacgccactgctgactacatctgcaaagtcaagtggggtgatatagagttccctcccccctttgggcgtgaggcatacccagaggaagcctacattgcagacctggatgccaaaagtggggcgagcttgaagctgaccttgctgaaccccaaggggcggatctggaccatggttgccgggggtggcgcctctgtcgtgtacagtgataccatctgtgatcttggaggtgtcaacgaactggcgaattacggggagtactctggtgcccccagtgaacaacagacctatgactacgccaagaccatcctctcacttatgactcgagagaagcacccggatggcaagatcctcatcattggaggcagcattgcaaacttcaccaacgtggccgccaccttcaagggcattgtgagagcaattcgagattaccagggttccctgaaggagcacgaggtcaccatctttgttcgaagaggtggcccgaactatcaagagggattacgagtgatgggagaagttgggaagaccactggaatccccatccatgtctttggcacagaaactcacatgacggccattgtgggcatggcctgggcaccggccattcccaaccagccacccacagcggctcacactgccaacttcctccttaatgccagtgggagcacatcgacaccagcacccagcaggacagcgtctttttccgagtccagagctgacgaggtggcccctgcaaagaaagccaagccagccatgccccaagattcagtcccaagtccaagatccctgcaaggaaagagtgccaccctcttcagccgacataccaaggctatcgtatggggcatgcagacccgggctgtgcaaggcatgctggactttgactacgtgtgctcccgagatgagccttcagtggctgctatggtctacccgttcacgggggatcataagcagaagttttactggggacacaaggaaatcctgatccctgtcttcaagaacatggctgacgccatgaaaaagcatccggaggtagacgtgctgatcaactttgcatctctgcgatcggcttatgacagcaccatggagaccatgaactatgcacagatccggaccatagccatcatagcagaaggcatccctgaggctctcacacggaagctcatcaagaaggcagaccagaagggcgtgaccatcattgggccagccacggttgggggcatcaagcctggatgctttaagattgggaatactggtgggatgctggacaacatcctggcctccaaactgtatcgcccaggcagtgtggcctacgtctcgcgttcaggaggcatgtctaacgaactcaataatatcatctctcggaccacagatggtgtctacgagggtgttgccatcggcggggacaggtaccctgggtccacattcatggatcacgtgctgcgttaccaagacactccaggagtcaagatgattgtagttcttggggagatagggggtacagaagaatataagatctgccggggcatcaaggagggccgcctcaccaagccagtggtctgctggtgcatcgggacctgtgccaccatgttctcttctgaggtccagtttggccacgctggggcttgtgccaaccaggcttctgaaacggcagtagccaagaaccaggccttgaaggaagcgggagtgtttgtgccccgaagctttgatgagctcggagaaatcattcagtccgtgtatgaagatcttgtggccaaaggcgccattgtacctgctcaggaagtgccacctccaacagtacccatggactactcttgggccagggagctgggtttaatccgaaaacctgcctcattcatgaccagcatctgtgacgagcgggggcaggaactcatttatgcgggcatgcccatcaccgaggtcttcaaggaagagatgggcattggtggtgtcctgggcctcctctggttccagagaaggttgcccaagtattcctgccagttcattgagatgtgtctcatggtcaccgctgatcacgggccagctgtctccggggcccataacactatcatctgtgctcgggctgggaaggacctggtctccagcctcacctcagggctgctcaccattggggaccggtttgggggtgccttggacgcagcagcgaagatgttcagtaaagcctttgacagcggcattattcccatggagtttgtgaacaagatgaagaaggaggggaaactgatcatgggcatcggccatcgagtcaaatcgataaacaacccagacatgcgagtgcagatcctcaaagactttgtcaaacagcacttccccgccaccccgctgctcgactatgcactggaagtggagaaaatcaccacctcaaagaagccaaatcttatcctgaacgtggatggtttcatcggcgttgcgtttgtggacatgcttaggaactgtggctccttcacccgggaggaagctgacgagtatgttgacattggagccctcaatggcgtctttgtgctgggaaggagtatgggcttcatcgggcactatcttgaccagaagaggctgaagcaagggctgtatcgtcacccctgggacgacatttcctatgttctcccggaacacatgagcatgtaaccgagccagcagccctaccgtagaaaaaggaagacaaaaactccctcctcgacaatatagcggacagacagctggaaacagagcccgttatgggctgggcctggaatggaaatagccattgatgtgcaggcatggaaagccaacaccacaggcccattcagtccacacagagaagcttagtatttttttttatatatatatctatatatatataagcatagaaatttaaaaccaagccaatacttgtgacgtttgcgctgctacctgctgtatctattacatggaagactgtaagcaagcgctgtcagaataatgttcttctagggccttatgatgttgctttctttttttaattagttgaaaatttatttttcctctagaactagtggatccgacttttaagacttcaggatactatctgtttgtaggaccactgtctggtatcccacctcccactcatcttcacaccacatgaagaacactgtattaatctgattttttaggatctttttttttttttttgtgttatgtgttaagggtttatttagtatcccactgaaacgttctgtgtttcggaccaatgtctacttatgtcaaggggaggagggttggggccattgtacccttagccatcgtcacacatgtggagtagtaacttaaatgtaaagttgtaacatacaagtgtttaaaatggaaaccgcaaagcaaaaagctgtgaaacgtctcgtgtcttgtgttctctgtgttcatgcagctgacttgtctgttactgaagtgtgggtccaaagactcacatctgttccgcatctgtaacccacagagattctggcagctgccacctcagtctcttctctgtattatcatgtttggtttaaataaactagatagtaaaaa

SEQ ID NO: 183 - DNA, 133 bp, Rattus norvegicus (rat)
cttgtgttctctgtgttcatgcagctgacttgtctgttactgaagtgtgggtccaaagactcacatctgttccgcatctgtaacccacagagattctggcagctgccacctcagtctcttctctgtattatca

SEQ ID NO: 184 - DNA, 1606 bp, Rattus norvegicus (Norway rat)
ctgcagtcaagtgtactgggtgccaaggggacacagcttccttctaactggttgagcaagctgctaaagaaagagttggccgcccactgaggcagtcatgcagacctgaagtgacaagcagaagcctggcaggtttgtccctgggtagatggatcgcctgatacggacactggcgaccaaacgctgggattggctcaaaacaaggccgtgttgatccagtgactgggttttggcgtcctgtcaatctgctgtctgctcaaaagcctagaaatagtgcgggggcagtttgctggtctctgagaaaggaagcagccatgcaagtgctaacgaaacgctaccccaagaattgcctactgaaggtcatggatcggtactcggctgtggtgcggaacatggagcaagtggtgatgatccccagccttctgagggatgtggagctgagtgggtccggaggctcggtccaggacggagcccccgatctctatacctacttcaccatgctcaagagcatctgtgtagaagtagaccacgggctgctgccgcgggaggaatggcaggccaaggtggcaggcaatgaaggcagtgaggctgagaatgaggctgctgaaacagaggaggctgaggaagacaggctttcggaggagctggacctagaagcccagttccacctgcacttctccagcctccatcacatccttacccacctgacccagaaagcacaggaggtgacgcagaaataccaggaaatgacggggcaggtcctgtaggtcttcgactctatggaagatcactttacacgagagggaagacgatgaggacccagcggtgcatcagccccgagaccaggaaggaagacctggacccaggtggatgcgaaggcggctcctgtccctggtgtcccccacctccctctgagcgcatctgtggacttgctgcaggctcacctttaagatgtctgttgtgattcccaacttctcttccatgtcttagcagtttgaggtttcacaggcagcaagtatcagtagaaggcagaggtaatagcaagcggccagagttcacatcccatccctgggatgtcctttagtgcctggggtcacagttactctttcatgtataaagcagggacgctgtatttacctcacaaggttactaaacggacacggaatcaaaggcacctgtcacgtgcggatgtctgaacagctggtgtttctcttaccttcctcagagagcatgctctgtgtagctcttgcttttgaccctcacccaggaaaaggttgaggtagttgagtgtgtgggatgagcttctcatcctgttggatctgatgaggctgagcacaagtgaactatgcaactattatagtagcaattaaaaaatacatggcatgctgatctttttttttcttcttcttattgattcttcatgaatttcacatcatgacccccagtcccattcatcttctgcctccatcttcttcgtccctccatatctgccctccacccttgcaacttcctccacaaaagaaaacaaacaaataaacaaaacttcgctgtggaagctacggtgtgtcacacagtctacccttttcccaaacagcttttcctgcag

SEQ ID NO: 185 - DNA, 593 bp, Rattus norvegicus (Norway rat)
ggctgcagcctcctctcgctaaggaaaggctgcctgcccgttctagggagtcagtggttagcaagttggtcagggccccggggctactgtgtctctctgacttacagacgatgaccactggatcatcgatacggactacgacaccttcgctctgcagtattcctgccgcctgcagaatctggatggcacctgtgcagacagctactcctttgtgttttctcgtgaccccaatggcctgaccccggagacacggaggctggtgaggcagcgacaggaggagctgtgcctagagaggcagtacagatggatcgagcacaatggtggagcaactcttcctgagggacttagcagggctgggaggataagaggtgcagcatctgtgcaagtgggttacccgaggcctcctttggaccaagtctgattaaatttttccaggactgccatcagccacacagacaaggaccaaaggtttctcttcccctaaacgctaggcacttttctataaccaaagttgtgaaaccactctcttcttatgtttttgctccccacatttgctgctagtgcacaagccgagaccatcgcaagataaggtt

SEQ ID NO: 186 - DNA, 3097 bp, Rattus norvegicus (Norway rat)
ggtgcaggataccttgagaaaatggctgagtatctgaggctgccccactccctggcgatgatccgcctctgcaacccgccagtcaacgccgtcagtccaactgtaatcagggaagtaagaaatggactccagaaagctggatcagaccacacggttaaagccattgtgatctgtggcgcaaacggaaacttctgtgcaggtgctgatatccatggctttagtgcttttacccctggccttgcattaggaagcttggtagatgaaatacagagataccagaagccggtgttggccgctatccaaggtgtggctctcggaggaggactggagctggccttgggctgtcactatcggattgccaatgcaaaggctcgtgtcggcttgccagaagtcacactggggattcttcctggtgcaagaggaacccagcttctccccagggtcgttggagttcctgttgctcttgacctaattacctcaggaaaatatctttcagcagatgaagcactcaggcttggaattctggatgcagtcgtgaagtcagacccagttgaagaagccatcaaatttgctcagaagattatagataaacccatagaaccccgcaggatctttaacaagccagttccaagcttgcccaacatggacagtgtttttgcagaagccatcgccaaggtacgaaaacagtaccctggtgtcctggctccggagacgtgtgtccgctcaatccaggcctctgtgaagcatccctacgaagtaggcatcaaggaagaggaaaagctgtttatgtacctccgggcatccgggcaggctaaagccctacagtatgccttctttgctgaaaagtctgcaaataagtggtcaactccctcaggagcgtcttggaaaacagcctctgctcaacccgtctcctcagttggcgttcttggcttgggaacgatgggccgaggcatcgccatttcttttgcgagagtggggatctctgtggttgctgtggagtcagacccaaagcagctagatgctgcaaagaagataatcactttcaccttggagaaggaagcatccagagcgcatcagaacggccaagcttcggcaaaaccaaaactcaggttctcctcatccacaaaggaactttcaactgtggatttggtggttgaagcagtgttcgaagacatgaacctgaagaaaaaggtctttgctgagctgtcagccctgtgcaagccaggagcctttctgtgcaccaatacctcggcgctgaacgtggacgacattgcttcttccacagatcgccctcagctggtgattggcacccacttcttctcaccagcccatgtcatgaggttgctagaggtcattcctagccgatactcttcccctactaccatcgccacggttatgagcttgtccaaaaagatcggaaagattggagtagtggttggcaactgctatggatttgttgggaatcggatgttggctccctattacaaccaggggtttttcttgttagaggaaggtagcaagccagaggatgtagacggggtcttggaagagtttggttttaaaatgggacccttcagagtgtcagacctcgcagggctagatgtgggttggaaaattcgcaaggggcaaggccttactggaccatcattgccaccagggacccccgtccgaaagaggggcaacagcaggtactccccacttggcgatatgctctgtgaagctgggcggtttggtcagaagacaggtaaaggctggtatcagtatgacaagccactgggtcgcatccacaaacctgatccctggctttctacgttcctgtcacaatatagagaggttcaccacatcgagcagcgcaccatcagcaaggaggagatcctggagcgttgcttatattccctcatcaatgaggcgttccgcatcttggaggaggggatggctgctcgcccagagcacattgatgtcatctacttgcacgggtacgggtggccaaggcacaagggcgggcccatgttctatgctgcctcagttgggttgcccacagttctagagaaactgcagaaatattacaggcagaaccctgacatcccccagctggagcccagtgactacctcagaaggctggtagcccagggaagccctcctctgaaggaatggcaaagcttggcagggccccacggcagcaaactgtgattcagccttctgcgttttgccacgtatgttggcacctaatttcagtatgattccttcctaaaatccaaacagatcgctctgaagtacaaatcatgattgctgctgctgctgctgctgatagctggtcagtaaaagctcctctccgtatctttctacctcataattccaatggtcagacttcaggaatgtctacagttagtctatacctctgactgcacttctatcggaaaaattcaacgaatgtatgtttactactacaagcattcttctcttttgactgtttgcccactctaacaaaaacgtatacaaaatgttgctaatagaataattcacacctccagttgacaacccaaatggccttagcagatcaacacaggtggcatatacacgcacttgacacattccagctgtgtgaagttactgccacctgttgtaacatggtgctgggttagagcactgttctgagtgaggggaggcaggcagagaaggcaggcagataaggccacacatcatatggatgtggatataaaattccaggatatgcaggtctgtggacaacatagatgagtagcccaaggctgtaactgttcatacatgcatatattttttggtccttttttttttcggagctggggaccgaacccagggccttgcgcttcctaggtaagcgctctaaccactgagctaaatccccagccccgaggctgtaactgttagaggttaaaaatcactactgattagtacagagtatctttgggagctgataaaattttctaaaattactctagtggtggatctgtaacacattgagttcaatggttcaaagtgaattatattttatatatatatatatatatatatatatatacatatatatatagtctatctcaataaagttaataaaatt

SEQ ID NO: 187 - DNA, 966 bp, Rattus norvegicus (Norway rat)
cagcgtccggctctggactgtctatcgctctctgacgttcagtcccgggtcgctgcttgtgcgcgcacgccgcctcacacgacaaacttatggcggagcgcggggaactcgatctgacgggcgccaaacagaacaccggcgtgtggctggtgaaggttcctaaatatttgtcccagcaatgggcaaaagcccctggaagaggtgaagttgggaaactgaggattgccaagaatcaaggaaggactgaggtatcatttactttgaatgaggatcttgcgaatattcatgatatcggtgggaaaccagcttcagtcagtgctcctagagaacatccatttgtcttgcaaagtgttggaggacagacattaacagtgttcaccgagagctcctcagataaactgtcattggaaggaatagtggttcagagggcggaatgccgacctgctgccagtgaaaactacatgaaactaaagagattgcaaatagaagaatcttccaaacctgtaaggctctcacaacaggctgacaaagttgtaaccaccaattacaagcctgtcgctaaccatcagtacaatattgaatatgaaaggaagaagaaagaagatggaaagcgagctcgggcagacaaacaacacgtcctagacatgctgttctcagcctttgagaaacatcagtactataatcttaaggacttggtggacatcacaaagcaacctgtgggatacctgaaagaaatcttgaaagaaatcggcattcagaatgtaaaaggaattcacaagaatacgtgggagctgaagccagagtacaggcattaccaaacagaggagaagagcgactgagagaagcgtgtgcaacagttacaggcagatctctgccaccacacgctgactgcctgcccaccctgacaggacaaagacaactgagtctgtctgccattcctcagtaaactgttaaagctgggactcc

SEQ ID NO: 188 - DNA, 3617 bp, Rattus norvegicus (Norway rat)
ttctgccccttgtagctgttctgccctcccctttaaaggttgacttgccccgcggcgctccaccgcgctctagtcctctgacgcctccggctcaaccctttgcaacgcggatccccgcccgcctgactgcccgcgcagcgcagttccagcagcaaagcagaagggcgcgccgagatggagagcaaagccctgctcctggtggccctgggagtttggctccagagtttgaccgccttccgcggaggggtggccgcagcagacgggggaagagatttctcagacatcgaaagtaaatttgccctaaggacccctgaagacacagctgaggacacttgtcatctgattcctggattagcagactctgtgtctaactgccacttcaaccacagcagcaaaacctttgtggtgatccatggatggacggtgacaggaatgtatgagagttgggtgcccaaacttgtggctgccctatacaaaagagaacctgactccaatgtcattgtagtagactggttgtatcgggcccagcaacattatccagtgtctgccggctataccaagctggtgggaaatgatgtggccaggttcatcaactggctggaggaagaatttaactaccccctagacaatgtccacctcttagggtacagtcttggagcccatgctgctggcgtggcaggaagtctgaccaacaagaaggtcaatagaattactggcttggatccagctgggcctaactttgagtatgcagaagcccctagtcgcctttctcctgatgatgcggatttcgtagatgtcttacacacatttaccagggggtcgcctggtcgaagtattgggatccagaaaccagtagggcatgttgatatttatcccaatggaggcactttccagccaggatgcaacattggagaagccattcgtgtaattgcagagaaggggcttggagatgtggaccagctggtgaagtgctcgcacgagcgctccatccatctcttcattgactccctgctgaatgaagaaaaccccagcaaggcatacaggtgcaattccaaggaggcctttgagaaagggctctgcctgagttgcagaaagaatcgctgtaacaacgtgggctatgagatcaacaaggtcagagccaagagaagcagtaagatgtacctgaagactcgctctcagatgccctacaaagtattccattaccaagtcaagattcacttttctggaactgagaatgacaagcaaaacaaccaggccttcgagatttctctgtatggcacagtggctgaaagtgagaacattcccttcaccctgccggaggtcgccacaaataaaacctactccttcttgatttacacggaggtggacatcggggaattgctgatgatgaagcttaagtggaagaacgactcctacttccgctggtcagactggtggagcagtcccagctttgtcatcgagaagatccgagtgaaagccggagagactcagaaaaaggtcatcttctgtgccagggagaaagtttctcatctgcagaaaggaaaggacgctgcagtgtttgtgaaatgccatgacaagtctctgaagaagtcgggctgacactggacaaaccaacaagagaagaaagcatctgagttctttgaagaccgaagaaaatgaagtaaattttatttaaaaaaaatacccttgtttgggtgtttgaaagtggattttcctgagtattaatcccagctatatcttgttagttaaatagaagacagtgtcaaatattaaaaggtggctaacacaacgtgaggaacctaatggccgatagcatgtcctccagcatcagaagacagcagagaggagaagcatgccatcttatatcccttaagaaggaatcatttgttcccaaccatacaagactccttcatgtgacccatttggtcatggtctaaaattagtaagggcctcttattttcattagatctctgaggttttaaattgagaccttctcaaagttctcttgaagtctaatatagacaacatttttttgtgctgtgagtcagatccatttctttagcagttgaaacagctggccattgtaactagttcttttaccatcaggatatagcacccctaccaaataaaataaataaataaagtgaccagggacatgtgactttgcaaaagcaatggacgacgtggctcgtggattcctgacccttagtcccaccacaacgaagtacaagtcagtagaggtacaaaacctagactgagtaattcttagtagacttcaagttttatggcttaattcctctgtcttttaaaaacgtgtcacatattataacattattctctagacagatgttgaaatgagcttgtgattcaggtgacatatgaattgagctgagagaaaataatgccctggctgattttatttctctgttttgctttcttgagaaaaggaatacttgtcccactccgtatctgagcctgaccaagaactaaactatgtacttcaggcttaccttgaactctcaaccatcctgccttggcttcctgagtgctgggagcttgataaccataattttattatcagatttttcttagtcattttcaccaatagaacacattcaatgcccaatcgttagcatttcgtttgagactcatcttgaccgtacctctgtcacacgtctaacacatcacattaatttctagtttagaagtgatcaagttcaaattctgcactgcgcaaagtacaagttttagagcaggaccattttttttttaccacgtaaaagtcgaaattactaggaaatgtgtatatcgatgcttgtacactgttgcgtgcaaagtgaggagccttctattgtgatagccatagacagtaccaggctcgttgccgctcttttgttttactataaaaaaataatgaagaattatttatgaacaagatctcatatgttcagattgcttttactattcatcaatataaaatgttaaaaaaaaaaaataaaacaagttctatctcagaggctgttgctgggaacagaaactgtgaaatgtgtgggtatctgaacacctacacacaagcaaagccccacaagagtctttgtcattcaatgtcattcagaaaggaaagagtcaagagatataccataatatgtcagagaagtagttccagatatgctggaatgctagcccttgctaggagaaagttggttgtgcctatgtaatataggacaaaagtgactggtttcattaggctcagtgtcattctaacaataaaatgatgtaccatatgtcaccagcatccccattattgctaattcatggcagtatatacgtacatatctcaatgatgctttgactttaaattttatttattagctgtaaataatgtgtgggtgtgtaaggaagcttgtaaacactggaaacgctgttgtggctatctggggtgtagatttgtggtgctaactctgtgtccacctccatcagtgattgtctcactgagccaactcactctgatgaacagcacaatggaatagcttttgaaggaagaaaataaactcacctgtgtgaagaaatgggatctgctttcaataaaatcgagaacgttttatccggaatccgcg

SEQ ID NO: 189 - DNA, 821 bp, Rattus norvegicus (Norway rat)
aggaaggagtccagagacacagagagcaagatgagttccgagacaggccctgtagctgttgatcccactctgaggagaagaattgagccccacgagtttgaagtcttctttgacccccgggaacttcggaaagagacctgtctgctgtatgagatcaactggggaggaaggcacagcatctggcgacacacgagccaaaacaccaacaaacacgttgaagtcaatttcatagaaaaatttactacagaaagatacttttgtccaaacaccagatgctccattacctggttcctgtcctggagtccctgtggggagtgctccagggccattacagaatttttgagccgatacccccatgtaactctgtttatttatatagcacggctttatcaccacgcagatcctcgaaatcggcaaggactcagggaccttattagcagcggtgttactatccagatcatgacggagcaagagtctggctactgctggaggaattttgtcaactactccccttcgaatgaagctcattggccaaggtacccccatctgtgggtgaggctgtacgtactggaactctactgcatcattttaggacttccaccctgtttaaatattttaagaagaaaacaacctcaactcacgtttttcacgattgctcttcaaagctgccattaccaaaggctaccaccccacatcctgtgggccacagggttgaaatgacttctgggagttggggatggatgaaatgactccttgtatgtcttgacagcagcaattgattacccactaaagagcgactgccacaaggaatctagaagtcg

SEQ ID NO: 190 - DNA, 405 bp, Rattus norvegicus (Norway rat)
attctctcttcgagctttagagagatggagacagacacactcctgctatgggtgctgctcctctgggttccaggctccactggtgacattgtgctgacccagtctcctgctttggctgtgtctctagggcagagggccaccatctcctgtagggccagtgaaagtgtccgttcatctatgcactggtaccaacagaaatcgggacagcaacccaaactcctcatctacggtgcatctaacctagcatctggggtccctgccaggttcagtggcagtgggtctgggacagactttaccttcaccatagatcctgtagaggctgatgatattgcaacctattactgtcagcagagtaggaatgatccgtacacgtttggagctgggaccaagctggaactgaaacgg

SEQ ID NO: 191 - DNA, 14279 bp, Rattus norvegicus (Norway rat)
gcggacacagcgtcttctgtcgccggtttctttcgctcactgctccctcgttccggaggtagctcttctcggctctctctctctctcttctctatctctctcccttccgcggatccgccatgtcggagaccggcggcggtgaggacggctcggccggcctggaggtgtccgcggtgcagaatgtggcggacgtgtcggtgctgcagaagcaccttcgtaagctggttccgctgctgctggaggacggcggcgacgcgccggctgcgctggaggcggcgctggaggagaagagcgccctggagcagatgcgcaagttcctgtcagacccgcaggtccacacggtcctggtggagcgctccaccctcaaagaggacgttggtgatgaaggagaagaggagaaagaattcatttcctataacatcaacatagacattcattacggggtgaagtccaatagcttggcgttcatcaagcgagcccctgtgattgatgcagacaagccggtgtcttcccagctccgagtcctcacgctgagcgaagactcgccctacgagaccctgcactccttcatcagcaatgcagtggctcctttctttaagtcctacatcagagagtctggcaaagcagacagggatggagataagatggctccttcggttgagaaaaagattgcagagcttgagatggggctccttcacctgcagcagaacattgagatcccggagatcagcttgccaatccaccccattatcaccaacgtcgctaagcagtgctacgagcgtggagaaaagcccaaagttacagatttcggtgataaggttgaagacccaacctttcttaaccagttacagtctggagttaatcggtggatccgagaaattcaaaaggtgaccaagcttgaccgagatccagcatcaggaactgccttgcaggaaatcagcttttggctaaacttggagcgtgcattgtaccgcatccaggagaagcgggagagcccagaggtgctcctgactctggacatcttgaagcatggcaaacgtttccatgccactgtcagttttgacacagacacaggtcttaagcaggcgttggaaacggtgaatgactacaatcctctgatgaaagacttccccctgaatgacttgctgtctgccactgagctggacaagataaggcaggcacttgttgcaattttcacacatctgagaaagatccgaaacacaaaataccccattcagcgggccctgcgacttgtggaggcaatttccagagacttgagttctcagttgctcaaagtcttgggcacgaggaagttgatgcatgtagcgtatgaagagtttgaaaaggtcatggtggcttgcttcgaagtcttccagacgtgggatgatgagtatgagaaactccaagtgctgctgagggacatcgtcaagaggaagagggaggagaacctgaagatggtgtggcgcatcaaccctgctcacaggaagctgcaggcccgcctggaccagatgaggaagttccgccgccagcacgagcagctgagagctgtcattgtcagagtcctgcgcccacaggtcacagcagttgcacagcagaaccaaggagaggcacctgaaccccaagacatgaaagtggccgaggtcctctttgatgctgcagatgccaacgccatcgaggaggtgaacctggcctatgagaacgtcaaggaagtagatgggctggatgtttccaaagaagggacggaggcttgggaggctgcaatgaagagatacgatgagaggatcgaccgcgtggagacccgcatcactgcccgcctccgagatcagctcggcacagccaagaatgccaatgagatgttcaggattttctccaggttcaacgcactgttcgtccgcccacacatccgaggggccattcgtgaataccagacccagctgatccagcgtgtaaaagatgacattgagtctctgcacgacaagtttaaggtccagtacccacaaagccaagcttgtaaaatgagtcatgtccgcgacttgccccctgtgtcagggtctatcatctgggctaaacagattgaccgacagctcactgcctacatgaagcgagtggaagacgtcctgggcaagggttgggagaaccacgtggaagggcagaagctgaagcaggatggtgacagctttcgaatgaagctcaacacccaggaaatcttcgatgactgggcgaggaaggttcagcaacgcaaccttggtgtttccgggcgcatcttcaccattgagagcgctcgcgtgcggggccgctctggaaacgtcctcaagctaaaggtgaacttccttccagagatcataacactctccaaagaagtccggaacctcaagtggcttggcttccgcgtgccacttgcaattgtgaacaaggctcaccaagccaaccagctctacccatttgccatctcgctgattgaaagcgtccgcacttacgaacgtacctgtgagaaggtggaggagcgcaataccatttcactgctagtggccggcctgaagaaggaggtgcaagccttgatcgcagaaggcatcgcgttggtgtgggagtcctacaaactcgacccctatgtgcagcgcctggcagagacggttttcaacttccaagagaaggtggacgacctcctgattatcgaggagaagatagacctggaagtccgttccttggaaacctgcatgtatgatcacaagacattctctgaaatcttgaacagagtgcagaaagcagtggacgacctcaacctgcactcctactccaacctgcccatctgggtcaacaagctggacatggagattgaaaggatactgggtgtccgcctgcaagctggccttcgagcttggacccaggttctcctcggacaagctgaagataaagcagaggtagacatggacaccgatgctccacaagttagtcacaagcctggtggagagcccaagatcaaaaacgttgttcatgagctaagaataacaaatcaggtaatctatttgaatccacccatcgaagagtgcaggtacaagctataccaggagatgtttgcttggaagatgattgtgctgtccctgcccaggatccagagtcagaggtaccaggtgggagtgcattatgagttgaccgaggaagagaagttctatcggaatgccttgacacgcatgcctgacggccctgtcgcactggaagagtcctactcggcggtcatgggcattgtgactgaagtcgagcagtatgttaaggtttggcttcagtaccagtgtctgtgggacatgcaggcagagaacatttacaacaggctgggggaggacctcagcaagtggcaagcgctcctggtgcagatcaggagagcccgagggaccttcgacaatgccgagaccaagaaggagtttggaccagtggtgatagattacggcaaggtccagtccaaggtgaacttgaagtatgactcctggcataaggaggttctcagcaaatttgggcagatgctgggctcaaacatgacagaattccattcccagatctcaaagtctcgccaagagctggagcagcactccgttgacacagccagcacctctgacgcggtgaccttcatcacctatgtgcagtctctgaaacggaagatcaagcagttcgagaagcaagttgaactctaccgcaatggtcagcgtctgctggaaaaacaaaggttccagttcccaccttcttggctttacattgacaacatcgagggtgagtggggggccttcaatgacatcatgcgtcggaaggactctgccattcagcaacaggttgcaaacctgcaaatgaagatcgtgcaggaggaccgagctgtggaaagccggactaccgatctgttgacagactgggagaagaccaaacctgtcacaggcaacctacgtcctgaggaggctcttcaggccctcaccatctatgaagggaagttcggccgactgaaggatgacagggagaagtgtgccaaggccaaggaggcactggagctcacagacacggggctcctcagcggcagtgaagaacgagtccaggtggccttggaggagttacaagacctcaagggggtgtggtcagagctttctaaggtctgggaacaaattgatcaaatgaaggagcagccatgggtctcagttcagcctcgtaagcttcgacaaaacctagacggcctcctgaaccagctgaagaacttccctgcaaggcttcggcagtacgcctcctatgagtttgttcagaggctgctgaaaggctacatgaagataaacatgttggtaattgaattgaaatcggaagcacttaaagaccggcactggaagcagctgatgaagaggcttcacgttaattgggtggtttctgagctgaccctgggccagatctgggatgttgaccttcagaagaacgaagccattgtcaaggatgtgctgctagtggcacaaggagagatggctttggaagaatttttgaagcagatacgggaagtgtggaacacatacgaactagacttggtcaactatcagaacaagtgccgtctgatccgaggctgggatgacctcttcaacaaggtcaaggagcacatcaacagcgtctctgccatgaagctctctccgtattacaaggtgtttgaagaagatgccctgagctgggaggacaagctgaaccgaatcatggctctctttgacgtgtggattgatgtgcagaggcgctgggtctacttggaaggcatcttcacaggcagtgcagacatcaaacatctgctgcctgtggaaacccagcgctttcagagtatcagcacggagtttttggctctgatgaaaaaggtctccaagtctccacttgtgatggatgttctgaacatacagggagtccagaggtctctggaaaggttggccgacctgcttggaaagatccagaaagcattaggggagtacctggaacgagagcgctcatctttccccaggttctactttgtgggtgatgaggatttgcttgaaatcattggaaatagcaagaatgtggctaagttgcagaagcacttcaagaaaatgttcgctggcgtttccagcatcatcttaaatgaggacagctctgtggtcctcggcatttcctcccgagaaggggaggaggttatgtttaaaactccagtgtccatcactgaacaccccaaaatcaacgagtggctcactctggtggaaaaggagatgagagtcaccttggccaaacttctggcagaatctgtaacagaagtggagatttttggaaaagcaacttctattgacccaaatacctacattacttggattgataaataccaggcccagctagtggttttgtcggcccagatagcctggtctgagaacgtggagaatgcactaagcaacgtcggaggaggcggagacgtggggcccttgcagtctgtgctcagcaacgtggaggtcacactcaacgtcttagcagattctgtcctcatggagcagccccctctccggagaaggaaactggagcacttgatcacagagttggttcaccaaagagatgttaccaggtccttgatcaaaagcaagattgacaacgccaaatctttcgaatggctcagccagatgcgattttactttgaccctaagcaaacggacgtgttacagcagctgtccatccagatggcaaatgccaagtttaactacggctttgagtacctgggcgttcaagacaagctggttcagacgcccctcacggaccgctgctacttgacaatgacacaggctctggaggccaggctcgggggctccccgttcggaccggctggaacaggaaagacggagtctgtcaaagccctcggccatcagctggggcgattcgtcttagttttcaactgtgacgaaacctttgatttccaggcgatgggacggatcttcgtggggctttgccaagtgggcgcgtggggctgcttcgatgagtttaaccggctggaggagcggatgctgtccgctgtgtcccagcaggtgcagtgcatacaagaggcactgcgggagcactccaaccccaactacgacaagacctcagcccccattacttgtgagctgctgaacaaacaagtcaaggttagcccagatatggctatcttcatcaccatgaatccaggctacgcaggccgctcaaacctccctgacaacctcaagaagctcttccggagcctggcgatgaccaagcctgaccggcagctgatcgcccaggtcatgctgtactcacagggcttccggactgctgaggtccttgccaacaaaatcgtcccgttctttaaactgtgtgacgagcagctgtcttctcaaagccattatgactttggtctgcgggctttgaagagcgtgctcgtgagtgcaggcaacgtgaagagggagaggatccagaagataaagagggagaaagaagagcgaggggaagccgtcgatgaaggagagatcgctgagaacctgcctgagcaggagattctgatccagagtgtctgcgagacgatggtgcccaagctcgtggcggaagacatcccgctgctcttcagtctcctgtcagacgtgttccctggggtgcagtaccaccgtggggagatgacagcccttcgagaagagctgaagaaagtgtgtcaggagatgtacttgacgtatggtgatggagaagaagttggcgggatgtgggttgaaaaggttctccagctctatcagatcacccagattaaccatggcctgatgatggttgggccttcaggaagcgggaagagcatggcctggcgtgtgctgctgaaagctcttgagaggctcgagggtgtggagggtgtggcccacataattgaccccaaggccatcagcaaagaccacctctacggaaccttggatcccaacaccagggagtggacagacggactcttcacacatgtgctgagaaagatcatagacaatgtgagaggcgagctgcagaagcgccagtggattgtcttcgatggtgatgtggaccccgagtgggtggagaacctcaactccgtgctcgacgacaacaagctcttgacattgcccaatggagagcgtcttagcctgccacccaatgtgcgaataatgtttgaggtgcaggacttgaagtatgcaaccctggccaccgtgtctcgctgcggcatggtgtggttcagtgaggacgtgctgagcacggacatgatcttcaacaacttcctggccaggctgcgcagcattcccctggatgagggggaggatgaggcacagcgaaggcgcaaaggcaaagaagacgagggtgaagaggccgcctctccaatgctgcagattcaaagagatgcagcaacgatcatgcagccatacttcacgtccaatggcctggtcaccaaggcgctggagcatgccttcaagctggagcacatcatggacctgacccgcctgcgctgcctgggctcactcttctccatgctgcaccaggcctgccgcaatgtggcccagtacaatgccaaccatcctgatttccccatgcagattgagcagctggagcgctacattcagcgctatctggtgtatgccatcctctggtccttatctggagacagccggctgaaaatgagagcagagctgggcgagtacatcagaaggatcaccactgtgcctctgcccaccgcgcccaacatccccatcattgactatgaggtgtccatcagtggagaatggtcaccgtggcaggccaaggtgcctcagattgaagtggagacacacaaggtagcagccccagatgtcgtcgtgccaaccctagatacagtccgccatgaagctctcttgtacacctggctggctgagcacaaacccctggtcttatgcggccctcctgggtctggcaagaccatgacactcttcagcgccctccgagccttgcctgacatggaggttgtgggcctgaacttctcaagtgccactacaccagagctgttgctgaagacgtttgaccactactgcgaataccggcgcacccctaacggtgttgtcttggctcctgttcagcttggaaagtggctagtcctgttttgtgatgaaatcaacttgccagatatggataagtacggtacccagagagtcatctccttcatcagacagatggtggagcatggaggcttctatcgtacctcagaccaaacatgggtgaagctagagagaatccagtttgttggagcttgcaatccgcccactgaccctgggagaaagcccctctcacataggttcttgcgccacgtgcctgttgtgtatgtggattacccaggaccagcctccctgacgcagatctatggcaccttcaaccgcgccatgctgagactcattccctcgctccgcacctatgcagaacccctcaccgcagccatggtggagttctataccatgtcccaggagagatttactcaggacacacagccacactatatctattcaccccgtgagatgactcggtgggtaagaggaatctttgaagcactgagacccctggagacattgcctgttgaaggtctcattcgcatttgggcacatgaagccctccgtctcttccaagacaggcttgtggaggatgaagagcggcgctggactgatgagaacatcgacatggttgccttgaagcatttccctaacatagacaaagagaaagccatgagccggcctatcctgtacagcaactggctgtcaaaggactatatcccagttgaccaagaggagctaagggattatgtcaaggctaggctgaaggtcttctatgaagaagagcttgacgttcccctggtcttgttcaatgaagtgctggaccatgtgctcaggattgacaggatattccgacaacctcaaggccacttgcttctcattggtgttagtggagctggaaagaccaccctgtctcggtttgtcgcctggatgaatggcttgagtgtctatcagattaaggtccacaggaaatacactggggaagactttgatgaagacctcaggacagtgctgcgacgctcgggctgcaaaaatgagaagatagcattcataatggatgaatccaatgtcttagactctgggttcctggaacgaatgaatactctgctggccaacggcgaggttcctgggctctttgaaggggacgagtatgccacgttgatgactcagtgcaaagagggagcacagaaggagggcctcatgctggactcacatgaggagctctacaagtggttcaccagccaggtgatccgcaacctgcacgtggtgttcaccatgaacccgtcctcagaggggctcaaggacagggcggccacgtcaccagcccttttcaacaggtgtgtgctgaactggtttggtgactggtccacagaagcactctatcaagttggcaaagaattcaccagtaaaatggacctggagaagccaaactatatagtgcctgactacatgccagttgtgtacgataaacttccacagcccccaacacaccgggaagccattgtgaacagctgtgtgtttgttcatcagactcttcaccaggctaacgcacgcctggcaaagcgaggcggcagaacaatggccatcacacctcggcactacctggacttcatcaaccactacgccaacctcttccatgagaagcgcagcgagttggaggagcagcagatgcacctgaacgttgggctccgaaaaatcaaagagactgtggaccaggtggaagaactgcgccgtgacctgaggatcaagagccaagagctggaggtcaagaacgcagcagccaatgacaagctgaagaaaatggtgaaagaccagcaagaggctgagaagaaaaaggtcatgagccaagaaattcaggagcagctgcacaagcagcaggaagtgattgcagataagcagatgagtgtcaaggaggatctggataaagtagagcctgctgtcatcgaggcccagaatgctgtgaagtccatcaagaagcagcacctggtggaggtaaggtccatggccaaccctccagctgccgtgaagctggctctggagtccatctgcctgctgcttggtgagagcaccacggactggaagcagatccgctccatcatcatgagagagaacttcatccccaccatcgtcaacttctcagccgaggagatcagtgacgccataagagagaagatgaagaaaaactacatgtccaaccccagttacaactacgaaatcgtcaaccgggcttctctggcttgcggccctatggtgaagtgggcaattgcacagctcaattatgcagacatgttaaagcgagtggagcccctgcggaatgagctgcagaagctggaagatgatgccaaggacaaccagcagaaagccaatgaggtggagcagatgatccgggatctggaagccagcatcgcccgctacaaggaggagtatgctgtcctcatctcggaggcccaggccatcaaggcagacctggcagctgtcgaagcgaaagtaaaccgaagcactgcacttctaaagagtttatctgctgaaagggaacgttgggaaaagacaagtgaaacgttcaaaaaccagatgtctaccattgctggggactgcctcctgtcggcggccttcattgcttatgcaggctactttgaccagcagatgcgccagaacttgttcaccacctggtctcatcacttacagcaagccaacatccagttccgcacagacattgccaggacggagtacctctccaatgctgacgagcgcctccgctggcaggccagctccctgcctgctgacgacctgtgcacagaaaacgccatcatgctaaagcggttcaataggtacccgttgatcattgacccctccggacaggccacagaattcatcatgaatgagtataaggaccggaagatcacaaggaccagcttcttagacgatgccttccggaagaatttggagagtgctctgagatttggcaatccccttctcgtccaggatgtggagagctacgatccagttttgaatccagtactgaaccgtgaagtccggcgaacaggagggagagtgctgattaccctcggtgaccaagacattgacctgtcaccatcctttgtcatctttctgtctacccgagacccaactgtggagttcccaccagatctctgttcccgggtgaccttcgtgaacttcacggtcacccgcagcagtttacagagccagtgtctcaatgaagttcttaaagcagaaaggcccgatgtggatgagaagcgttctgacctcttgaagctgcaaggggagttccagctccgtttacggcaactggaaaagtctctgctccaagctctgaacgaggtaaaaggccgcattctggatgacgacaccatcattacaaccctggaaaatctgaagcgggaagccgccgaggtcaccagaaaggtggaggagacggacattgtcatgcaggaggtagagaccgtgtcccagcagtacctgccgctgtccactgcatgcagcagcatctacttcactatggagtccctgaagcaggttcacttcctgtatcagtactcactgcagttcttcctggacatctaccacaatgtgctctatgagaaccccaacctgaagggcgccaccgatcacacacagcgcctctctgtcatcaccaaggacctcttccaggtggcctttaaccgggtggcccgaggcatgctgcaccaggaccacatcaccttcgccatgctgctggcgaggatcaagctgaaaggcaccatgggggagcccacctatgacgcagagttccagcacttcctccgagggaaggagatcgtgctgagtgctggctccacccccaaagtccagggcctgactgtggagcaggcggaagctgtggcaaggttgagctgtctgcctgcctttaaagatctcattgccaaggttcaggcagatgagcagtttggcatttggctggagagcagttcaccagagcagacagtgccatacctctggactgaggagacgcctgcaactcccatcgggcaggccatccaccgcctactcctgattcaagctttccgacccgaccgcctgctggccatggcccacatgtttgtttccacaaacctcggagagtccttcatgtccatcatggagcagccacttgacctcacccacattgtgggcacagaggtgaagccaaacacacctgtcctgatgtgctctgtgcctgggtatgatgccagcggacatgtcgaggacctcgccgcagagcagaacacacagatcacttctattgccattggctcagcagaaggctttaaccaagcagataaggcgatcaacaccgcggtgaagtcaggcaggtgggtgatgctgaagaatgtgcacctggcccccgggtggctgatgcagctggaaaagaagcttcactccctgcagccacacgcctgcttccgactcttcctcaccatggagatcaaccccaaggtgcccgtgaacctgctccgtgcaggtcggatctttgtgtttgagccgccacctggcgtgaaggccaacatgctgaggaccttcagcagcatccccgtctccaggatgtgcaagtctccaaatgagcgagcccgcttgtacttcctgctggcctggttccatgctgtcatccaagagcgcctgcgctatgctccactcgggtggtccaagaaatacgaatttggagaatctgaccttcgatcggcttgtgacacggtggacacatggttggatgacacagccaagggccgacagaacatctcaccagataagatcccatggtctgccctgaagacattgatggcccagtccatctatggtgggcgggtggacaatgagtttgaccagcgtctgctcaataccttcctggagcgcctgtttaccacccggagtttcgatagtgaattcaagctggcgtgcaaggtcgatgggcacaaggacattcagatgcctgacggtatcaggcgagaggagtttgtgcagtgggtggagctgctgcctgacgcccagacaccctcatggctgggcctccccaacaatgctgaaagggtcctgcttaccacccaaggcgtggacatgatcagcaagatgctgaagatgcagatgctggaggacgaggacgacctggcctacgcagagacggagaagaagacaaggacggactccacctcagacggccgtccagcctggatgagaacactgcacacgacggcctcaaactggctgcacctcatcccacagacactgagcccactgaagcgcacggtggagaacatcaaggaccctttgtttaggttcttcgagagagaggtgaagatgggggccaagttactgcaagatgtgcgccaagaccttgctgacgtcgtccaagtgtgcgaggggaaaaagaagcagacaaactacctgcgcacgctcatcaatgagctggtgaaagggatcttgccccggagctggtcccattacacagtacctgcaggcatgacggtgatccagtgggtgtcagatttcagcgagaggatcaaacagctgcagaatatctcacaggctgctgcagccgggggtgccaaggaactgaagaacatccacgtgtgcctgggtggcctgtttgtgcctgaggcctacatcactgccaccagacagtatgtggcacaagccaacagctggtccctggaggagctctgcctcgaagtcaatgtcaccgcctcccagagtaccacccttgatgcgtgcagctttggggtcacaggtctgaagctccaaggggccacgtgcagcaacaacaaactctcgctgtccaatgcgatctccacagtcctccccctcacacagctacgctgggggaagcaaactagtgctgagaagaaggccagtgtggtgactttacctgtctatctgaacttcacgcgggcagacctcatcttcactgtagactttgaaattgctacaaaggaagatcctcgaagcttctatgagcgtggagttgcagttctgtgcactgagtaaagctaagcttttcccgaatcctctttctggaatagtagaacccaatatttaactctcattcatccttacacatttggagggtttgatggacccgtgaaaagcaagtggtcggttagcgttggtggtgaaaggtgctgcagttggaaatgggctgggaagggtgaagtgtgcggtttccaagggctgaccaaatggctggttttattaaataaaacactaagcatg

SEQ ID NO: 192 - DNA, 2171 bp, Rattus norvegicus (Norway rat)
ccttgccgctcgctgctagcttggatccgcgtggactacagggactgaatcggacccggaaccacatggccccactcgccggtgcctctcgctcccgggtgtggtcagcggggctactgaggctgctgctgctgtcctgctttacgctccagaaagcgggtggggagatagctgtgcaggtgctctccaattcgaccggcttcttgggagggtctacagtcttgcactgtagtctggcttccaaagacaatgtgacaatcactcagctaacatggatgaagagggatccagatggatcccacccttccgtgcctgtcttccaccccaagaaggggcccagcatctctgatccagagagggtgaagttcttggttgccaaggtgtacgaggatctgaggaacgcatctctggccatctcgaacttgcgtgtagaagacgaaggcatctatgagtgtcagattgccacgttccccacaggcagtaagagcgccaatgtctggctgaaggtgttcgcccgacctaaaaacacagcagaggccctggagccctctcccaccttgatgccgcaggacgtggccaaatgcatctctgctgatggtcaccctcctggacgaatcacgtggtcctcgaatgtgaatggaagctaccgtgaaatgaaggaaacagggtcccagccgggcaccaccacagttatcagctacctctccatggtgccttctagccaggcagatggcacgaacatcacctgcacagtggaacatgaaagcttccaggagccggaccagcagccattgatcctttccctaccttatccacccgaagtgtccatctctggctatgaaggcaactggtacattggcctcactaacgtgaacctgacctgtgaagctcgcagcaaaccaccgcccaccaactatagctggagcacggccacgggtccccttcccaactccactcatttccaggaaaacggcagtcacctgctaatctccaccgtggatgacctcaataacacgatctttgtgtgcaaagccatcaatgccctagggtctgggcagggccaagtgaccatcctagttaaagaggcatctgagattctgccgccaaagacaagcttaggcactggctacatcattgccatcgtcttttgtgtcctgatcatcggagtagtagcaggcattgtattctggaaatacaggcgtggttgtggtcggcagtccaggaccttagacagggagaacgtccgctattcagcagcgaatggcgtctctgtcccaaacgtggagacgaacaacttgaggtgatggtgctggggtagacagaactaaggaacttgaagacataacaactggaaccctacttccacaaaagaaaaagcctccagagagacttgactgtccagtgtggcgaacatagcaaggttgggggtctccttggccgctgccgaattccgcattgtcgaaaggactcatggaacccggtgtgctgactcacacttgacatctcagcaagcgagggccacataaagcaaggttgagtctagcacggctgtagagagaagccctgtctatacacaggcaagctaaggggctttgagacagtcagaaactgaagtctttctttgggtaaggtaaatcctctacctcgtgtatgtgacaaacttgaaagacttctacctctgagactcaagtgcggactctctttatagctgactcagctggggctaacccctctctcctctctggacaaggtctcagagtgtagccaaagctagaccgaaactcacagaggtccgtctgtctctacctcccaagtgctgcagttaaaggtttgtgtgtgccacactcctttgctaggtctttttaataaagtaaatatttaataaagtaatatatttataaaaaaactagttataatatatattttttgagacagtgtttcctgtagcccaggctgacctcaaacttactatgtagccaagaatgatagtaaactaatttattttaatttgtcttcaagcttaaacatagcccaacccctgctcctttccctctcttctctcaatccattttcgtcttctttttcttcccagacactattctgatgtatgtcttcattgcaaacattttattgaccttcgtaaaaatgtgtgaaccacagataaaaaaaag

SEQ ID NO: 193 - DNA, 826 bp, Rattus norvegicus (Norway rat)
gcggcttgcggagcgggaggcagcggccggagagccaggcggaacctgcgggggcggaggcggcggtggcagccggggcgcagatagcaggaacaggatcaagccctccataccagggaccaggctaaaaccagattaccactgcccctacctgggccctgttgacttaaagcagccactgtaatcatgggcaatatctttgggaaccttctgaagagcctgatcgggaagaaggagatgcgcatcctgatggtgggcctggatgctgcaggaaagaccaccatcctctataagctgaagcttggcgagattgttaccaccattcccaccatcgggtttaatgtggagacagtggaatataagaatatcagcttcacagtatgggacgtaggtggccaggacaagattcggcccctctggagacactacttccagaatacccaaggcttgatatttgtggttgacagcaatgaccgggagcgagtgaacgaggcccgggaagagctgatgaggatgctggcggaggatgagctccgggatgctgtgctgcttgtgtttgcaaacaaacaggatttgccgaatgctatgaatgctgctgagatcacagacaagctgggcctgcactctctgcgccaccgcaattggtacattcaggccacctgtgccaccagcggggacgggctctatgaaggcttggactggctggccaatcagctcaaaaacaagaagtgagagccaggcagccctctctgactaccccacccactcctgaaacatacctgttgtctccttaccccaatttccccctttcttcctcatgaaatgt

SEQ ID NO: 194 - DNA, 1608 bp, Rattus norvegicus (Norway rat)
gacagccgaacacttaacgccgcgccggagccaccgcaccagtcgccgagcaggtcccggtcccgctacgtcgtgtcccgcggctctgccgacactccggcctgagagacgggtcttcagccttttctcttccgcccactcagttgtgagccggaaccgtgaaggcccgagggcggaccagaccctctctttttttgaccatcaagtgccaccaccgctatgggcctcaccatctcctctctcttctcgcgcctcttcggcaagaagcagatgcgcattttgatggttggattggatgctgcgggcaagacgacgattctgtataaactgaaactaggggagatagtcaccaccattcctaccattggttttaatgtggaaacagtagaatataagaacatttgtttcacagtttgggatgttggtggtcaagataaaattaggcctctctggaggcattacttccagaatacccagggtctcattttcgtggtagatagcaatgatcgtgaaagaattcaggaaggagcagccgtgctgcagaaaatgcttctggaagatgagctgcaggatgctgtgctgctgctttttgccaacaaacaggatttgccaaatgctatggccatcagtgagatgacagacaagttaggtcttcagtctctccggaacagaacatggtatgtccaagccacttgtgctacacaaggaactggtctgtacgaggggctggattggctgtcaaatgaactttcaaaacgctaaatgaaactggatatctaaccaaggacatgtttgatagaattggtctaggcttgttacaacaaaattagtttgcatcttggttattaaaggatatctgagacggtttgggcagaaattacagcatttaaaacttgttttgttgccaattattgtttaccaagaacaatgttgctgtttagcaatatgcttgggtttaagagaaattctccttgggggaaaaaagtgtccattattatacttcccctgaacctgaatgcctggatagatagcgattgtgacacccttaaataaatctgttttgagtgttttttgagcccacaccaataatgttttaaagttacccccttggaactcactgatacctatcattcctcgggcagtctgctgagttaaaaatgtagcattccatttgtatttatttcccccttgccaaaaagatttttctaataatgcttgtactggccagggatgagctccacaacactattcagttttcttgtactgaggattcccccacctccctcacattattgactcctggcttctatcagccaaactttgatgtagtttggatttgatagctaattctgggctggtttcaaagagttcatattgagataacttttaatactcagcaaattgtcttcctttatattatcttttttatgttgcatgttgccttttggaatcagcctgactctttgcccagcatatgatagttctgctggtattttactgtttactgatgaacatatcttcattaagaattttttgaaaactcatcaaattcaatgaataagttttcttcataacccatttggaattattcctaataaaatgattttt

SEQ ID NO: 195 - DNA, 123 bp, Rattus norvegicus (Norway rat)
cagaagtttaaagtaatccttggctacctagtgagtgtaaggccagcctggaatcaataagagttggtttcaaagaagcaggaggagaaggaggaacaggaacaggaggaggagcagggggag

SEQ ID NO: 196 - DNA, 2558 bp, Rattus norvegicus (Norway rat)
ctcttgaggcctcttgtctgagaggcactgaacgcaggagtctgcaggtgtggtccagatctccagatcccccaacccactgccaccatggtaggaaaaggtgccaaagggatgctgaatggtgctgtgcccagcgaggccaccaagaaggaccagaacctcacacggggcaactggggcaaccagatcgagtttgtactgacgagcgtgggctatgccgtgggcctgggcaatgtgtggcgtttcccatacctctgctatcgcaacgggggaggcgccttcatgtttccctacttcatcatgctggtcttctgcggcattcctctcttcttcatggagctctccttcggccagtttgcaagccagggctgcctgggggtctggaggatcagccccatgttcaaaggcgtgggctatggtatgatggtggtgtccacgtacatcggtatctactacaacgtggtcatctgcatcgccttctactacttcttctcgtccatgacgcatgtgctgccctgggcttactgcaataatccctggaacacacctgactgtgccggtgtgctggatgcttccaatctcaccaatggctcccggcccactgccctgtctggcaacctgtctcacctgttcaactacaccttgcaaaggaccagccccagtgaggagtactggaggctgtatgtgctgaagctgtcggatgacattggagattttggagaagtgcggcttcctctcctaggctgccttggcgtctcctgggtggttgtcttcctctgcctcattcgaggagtcaagtcttcagggaaagtggtgtacttcacggccacatttccctatgtggtgctgaccattctgtttgttcgtggagtgaccctggaaggagccttcacgggtatcatgtactacctgaccccaaagtgggacaagatcctggaggccaaggtgtggggggatgcagcctctcagatcttctattccctgggctgtgcatggggtggcctcatcaccatggcatcctacaacaaattccacaacaactgctaccgggacagcgtcatcatcagcatcaccaattgtgctaccagtgtctatgctggcttcgtcatcttctctatcctaggcttcatggccaatcacctgggtgtggatgtgtctcgggtggcagaccacgggcccgggctagctttcgtggcttaccccgaggctctcacactgcttcccatctccccgctctggtccttgctgtttttcttcatgctcatcctgctgggactcggtactcagttctgcctcctggagaccctagtcactgccattgtggatgaggtggggaatgagtggattctgcagaagaagacctacgtgaccttgggtgtggctgtggctggcttcttgctgggtatccctcttaccagccaggcgggcatctactggctgctgttgatggacaactacgcagccagcttctccttggttgtcatctcctgcatcatgtgcgtgtccatcatgtatatctatgggcaccggaactacttccaggacattcagatgatgctggggttcccaccgcctctcttcttccagatctgttggcgttttgtctctcccactatcatctttttcattctcatcttcacggtgatccagtaccggccaatcacttacaaccactaccagtacccaggctgggctgtggccatcggcttcctcatggctttgtcgtctgtcatctgcatcccattgtacgcattgttccagctctgccgcacagatggggacacacttcttcagcgtttgaaaaatgccacaaagccaagcagagactggggccctgccctcctggagcaccggactgggcgctatgcccccactacaaccccctctcctgaagatgggtttgaggttcagccactgcacccggacaaggcccagatccccatcgtgggcagtaacggctccagccgcctccaggactcccggatatgagcacagttgttgcaaggggagaagccccacccaacccttgctcctaccacagagactgaggaggtggtggaccggtgtgactgcctgccccatcatgccctggccagggtggctgctgtcaccttggccaccactgctcatgtccccagtgtttacacatcctttggatgccaagacagcagctgggggtggaaaagtgatgggggtgggggggaggtgcgtgggggtggggcatggggcggcagtgtccaaagcactttggaggaggtctcaggccatgtccccagaggcttccaggcttcattatccctcatgctctgccctgagctgtttcactacgggataagaggttttgtttccacaccccacctgttcccctccagcctcatgaccagtgttcctgaccccagaacagaccctagcctcttgcccaggcaaatctgtatcttcctgctccggacaaggtgaggcgcccgggggctgtacagtgttacttgttggactgcaccactcagccctgtttatttgtgtaattatttttttaaaaaattgtattacctgtggttgcc

SEQ ID NO: 197 - DNA, 1579 bp, Rattus norvegicus (Norway rat)
tagaggagttgagttcgtgtgtgtagggaggcagacagctccgacgcagactacggacctctccaggtctcagccgtcaaagaccctgtccggtagggagtggctcgctttgagggcaaggcttctcggatcgaggcttcttcatggccgctcgggtcgcgagcggccgggcgttcgctctttgcggaggacggcgtctaacagagcgcagttgattgaggaaacactagccggggatcatgagtggctgtcgagtgttcattgggagactaaatcccgcagcgagggagaaagatgtggaaagattcttcaagggttacggacggatcagagatattgatttgaaaagaggttttggttttgtggaatttgaggacccaagggatgcagatgacgctgtttatgaacttgatgggaaggaactttgcagtgaaagggttactattgaacatgctcgggctcggtctcgaggtggaagaggtagaggacgatactccgaccgttttagcagtcgcagacctcgaaatgatagacgaaatgctccacctgtaagaacagaaaatcgacttatagttgagaatttatcctcaagagtcagctggcaggatctcaaagatttcatgagacaagctggggaagtaacctttgcggatgcacatcgacctaaactaaatgaaggggtagttgagtttgcctcttatggtgacttaaagaatgctattgagaaactttctggaaaggaaattaatgggagaaaaatcaaattaattgaaggcagcaaaagacacaggtcaagaagcaggtcacgatctcggaccaggagttcctctaggtcccgtagccgatcccgttcacgcaggagcaagtcttacagccgatcaaggagcaggagccggagccggagcaagtcccgttctggtagtaggtctcccgtgcctgagaagagccagaaacgtggttcttcgagtagatctaaatctccagcatctgtggatcgccagaggtcccgatcccggtccaggtccagatcagttgacagtggcaattaattaaactgtaaataacttgccctgggcctttttttaaacaaaacaaaacaaattcccaaaccatacttgctaaaaattctggtaagtatgtgcttttctgtggggtgggatttggatggggttgggctggatttctttgtagatgtggaccaccaaggggttgttgaaaactaattgtattaaatgtcttttgataagccttctgctcacacttttgtgactgtctgaagtatatagtttgtgtatattgatagagctcttttataactaaagcatttaattttttgtactagaaaaacttttgaatattttagttcattgttcagatatgttaacataagattagtttaattgctcaattaaactaatgaatagctttggacactttaaaagagctctaaatttgcttgtatataaaagcttagtttgagttttccttgttagggtcaagggtgtcttcttgcccattaacagctgtagatagacttaaagcagctgtttgttactgataataaaatactaagtattat

SEQ ID NO: 198 - DNA, 831 bp, Rattus norvegicus (Norway rat)
ggcacgagtgactaagatggaagcgttttgggagtcacggactggccactgggcggaggtccggggcagttttaccggcgtcccgtcacccccagctgcctcatggatccgatgtctgcgcctgcgaggtccatcactcggacccagaatccgatgctgactgggacatccgtactaggggtgaagttcgactgcggagtggtgattgctgcagacatgctgggctcctacggctccctggctcgtttccgcattatctctcgtattatgcgagtcaacgacagcactatgctaggtgcttcaggagactatgctgatttccagtatttgaagcaagttctcggccagatggtgattgatgaggagctgttcggagatggacatagctatagtcctagagctatccattcatggttgacaagggccatgtacagtcgccgctccaagatgaaccctctgtggaacaccaaggtcattggaggctatgctggtggagaaagctttcttggttatgtggacatgcttggtgtagcttatgaagccccttcactagccactggttatggtgcatacttggctcagcctctgcttcgagaagttctagagaagcaaccggtgctgagtcagacagaggcccgagagcttgtggagcgctgcatgcgagtgctgtactaccgagacgctcgttcgtataaccggtttcaagttgctactgtaactgaaaaaggtgtggagatagaaggaccactgtcagcacagaccaactgggacattgctcacatgatcagtggctttgaatgaaatccagatgaagtgtccagagttaagctt

SEQ ID NO: 199 - DNA, 2758 bp, Rattus norvegicus (Norway rat)
catgagtgtacttctctcttggctaagaaagacagcaaagcaaagacttttaaagcgaagaagctggaaacaatcagaagaacaccatggaagaaacagagaaaaagattgcaacacaagagggtagattgttttccaagatgaaggtgtttctgctgtcattaacatgtgcatgtttaaccaaatcactatcaggagtatatatgaattccatgctcacacaaatagagagacaatttgatatctccacatctgtagctggattaatcaatgggagctttgagattggaaacctttttttcattgtatttgtgagttattttggaacaaaactgcacagacctgtggtgattggtattggatgtgtgattatgggcctggggtgtctcttaatgtcattacctcatttcttcatgggcagatacgaatatgaaacaacgatctcacctacaggcaacttgtcctcaaacagcttcttgtgtatggagaaccgaacacagaccttaaagccaacgcaagacccagcagaatgtgtgaaagaaatgaaatcattaatgtggatatgtgtaatggtaggaaatattatacgtggaattggtgaaactcctattgtgcccttgggtatctcttacatcgaagactttgccaaatcagaaaactctcctttatacattgggattttagaaatggggaaggttgctggcccaatttttggacttttgttgggatcttactgtgcacaaatttatgtagacattgggtctgtgaatacagatgacctgaccataacacccagtgatacacgctgggttggtgcttggtggattggctttttggtctgtgcaggagtgaatatcctgaccagcatcccctttttctttttgccgaaagcacttccaaagaaaggacaacaggagaatgttgctgtgactaaagatggcaaagttgagaaatatggaggacaagccagagaggaaaatcttggaatcactaaagatttcttgacgttcatgaagaggctcttctgcaatccgatttacatgcttttcatccttacaagtgtgctccaggtgaatggctttattaataaatttacgttcttgcccaaatacctggaacagcagtatggaaaatctactgcagaggcaatattcctcataggtgtttatagcttacctcccatatgcctcgggtatctaattggtggctttattatgaagaagtttaagattactgtcaagaaagctgcatacctagcattttgcctatcggtgtttgaatatcttctttttctttgtcactttatgttgacctgtgacaatgcagcagttgctggattaaccacctcttacaaaggagttcagcaccaactacatgtggagagcaaggtccttgctgactgcaacacaaggtgtagctgctcaacgaacacatgggatccagtgtgtggagacaatggtgtagcatacatgtcagcttgccttgcgggctgtaagaagtttgttggaactggaaccaacatggtgtttcaggattgcagctgcattcagtcattaggaaactcgtctgcagtcctgggtctgtgtaaaaaaggtcctgagtgtgccaacaggctgcagtactttttaatcttaacaataattatcagtttcatctactcacttacagccatacctgggtacatggtttttttgaggtgtgtcaagtctgaagagaagtcacttggagttggattacatacattttgcataagagtatttgctggtattcccgcacctgtttactttggcgctttgatagacagaacctgtttacattggggaaccctgaaatgtggtcagcgaggggcatgcaggatgtatgacataaacagtttcaggcacatttacctggggttgcctatagcactaagaggatcaagctatctgcctgccttcttcattctgatacttatgaggaaattccagttccccggggacattgactcttcagcaactgatcatacagagatgatgctcggagagaaggaaagcgagcacacagatgtgcatggaagtcctcaggtcgagaatgacggagaactgaaaacgaagctgtaatgagttttctactgccctgttcaaggccatgaacagaatgcacacttcccttcctcggaatcctgagagatacaataggaaccttctctttaaggacctcaacaattgtttttctcactataaaaataattgctgatatcatttttatagtgagaaaaacaataaaaataattgctgatatcattttcagaatttcaggtgatatttaagatttccctggggaagacttttatggtgacccccacactacactttaaagcttccttcattttcacataacattttctcttaactcaatcaagggaaatatgtgtttcccacacatctttaaatgagtataaaactttcctattcctgaaacagtatttaatttcattgaatttatggttcacagttggaagtatttagagctgaaaagatacattctcattaagccacattgaaaagttaacttttctatgttcaggatgtctccatatgtctatatgtaggagttctcaaatattattattattgtagacatgatgctcctagattagacttctcactcctgtgtcatttcctgtttctagtcccttctttcattactcctgtcacacagttgaatgttttgtttagagcactgacaaacttaatcaggttattaaaaatcacattag

SEQ ID NO: 200 - DNA, 2287 bp, Rattus norvegicus (Norway rat)
tctaaaggaaagatcacagctttcccagactgggagaaaaaatatggaatgtggtgtaccactgactgaccataaccaaatgaactgtagtgacagtagtctaaaagccagcggttaacaatttcttcagacttcaacactatccatcgctttccagagcagactcgctgtttacaagaactcttggcctcccgaagatagcaacctcaaattttgtttatttaaaatatttctgcaaaaggaaaagtaccccagagcccattttccaaaatggccatggatgggtatctgtggatggtcattttgggtttcattattgctttcatcctggcattttcagttggtgccaatgatgttgccaactcctttggaaccgcggtgggctctggcgtggtgaccctgagacaggcatgcattctggcttcgatatttgaaaccaccggctctgtgcttttgggagcgaaagtgggagagactatccggaagggcatcattgacgtgaacctctacaatgagactgtggaaacgctcatggctggggaagtgagtgcaatggtcggctcagcggtctggcagttgatcgcgtccttcctgagactcccaatctcagggacacactgcatcgtgggctctaccattggcttctcgctcgtggccatcggcccaaagggagtgcagtggatggaactcgtcaagatcgttgcctcctggttcatatccccacttctgtctggcttcatgtctggtgtgctgttcatcctgatcagaatgttcatcctaaccaaggaggaccctgttccaaacggtctccaggcacttcctctgttttatgctgccactatagcaataaacgtcttctccatcatgtacacaggagcaccagtgctgggcctgtcgctccccatctgggcaatagcgctcatctccttcggcgttgccctgctgttcgccttcttcgtgtggctgttcgtgtgtccgtggatgaagaggaaaatagcgggcaggttagagaaggagagtgctctgtcccgcgcgtctgacgaaagcctcaggaaggtacaggaagctgagtcccctgtctttaaggagcttcctggtgccaaagccagtgatgacagcgctgtccccctcaccagtctggctggggaggctgcgggggcctcagaaggcacgtcagcagggaaccacccccgggcttcctacggccgagcactttccatgactcacggctctgcaaagtcacccatctccaatggaacctttggcttcgaaggccacatgaggaatgacggtcacgtttatcatactgtacacaaagactcgggactctacaaagacttgctgcacaaaatccatgtagacaagggccccgaggagaaaccagctcaggaaaacaactacaggctgctccggaggaacaacagctacacgtgctacacggcagccatctgcggcatgccggtgcacgccaccttcagggcctcggacacctcctccgcccccgaggatagcgagaagctggtgggtgacaccgtgtcctattccaagaagaggctccgctacgacagctactccagctactgcaacgcggtggccgaggcggagatcgaggccgaagagggcggcgtggaaatgaggctggcctctgagctgaccgatcctgaccagcctcacgaggatcctgcggaagacgagaaggaggagaaggactccgcagaggtccacctgctcttccacttcctgcaagtcctcactgcctgctttgggtcctttgctcacggtggcaacgatgtgagcaatgctatcggtccccttgtggccctgtggctgatatataaacaaggcggagttacacaagaagctgctactccagtctggctgctgttttatgggggcgttggcatctgcacaggtctctgggtttggggcagaagagtgatccagaccatggggaaggatctcacacccatcacaccgtccagtggcttcactattgagctggcctctgccttcaccgtggtgatcgcctccaacattgggcttcccgtcagcaccacacactgcaaggtgggctcagtggtagccgtgggctggatccgctcccggaaggctgtggactggcgcctcttccggaacatatttattgcctggttcgtgaccgtgccggtggccggacttttcagtgctgctatcatggctctcctcatgtatatatgtggttttgtttcttccagtcggtaaatggccacagggatgctctgacacggatatggtcctcacctttaga

SEQ ID NO: 201 - DNA, 1227 bp, Rattus norvegicus (Norway rat)
ggaattcgcaacgcctacacaaagatccctatcactgagcacccggaggcaaggctcagaaccccaggatcagcaacatggagttctcccgtccaccgctagtgcatgtgaagggtatcccactcatcaaatactttgcagagacaattgggccattgcagaacttcacagcctggcctgatgacttgctgatcagcacatacccaaagtctggtactacctggatgagtgagatcctggatatgatctatcagggtggcaagctagagaagtgtggccgcgcccccatctatgcccgggtacccttccttgagttcaaatgtccaggggttccctcaggtcttgaaactttggaagagacaccagccccacggctccttaagacacatctgcccctgtccttgctccctcagagtctgctggatcagaaggtcaaggtgatctacattgcccgaaatgcaaaggatgtggttgtctcctattataacttctacaacatggccaagctgcaccctgatccaggcacctgggacagcttcttggagaacttcatggatggggaagtgtcctatgggtcgtggtaccagcacgtgaaggagtggtgggagctgagacacactcaccctgttctctatctcttctatgaagacataaaggagaaccccaaaagggagatcaagaagattctagagtttttggggcgctctctacccgaggagactgtggattccattgttcaccacacatctttcaagaaaatgaaagagaactgcatgactaactacacaaccatccccactgagattatggaccacaatgtttctcccttcatgaggaaaggtactactggggactggaaaaataccttcactgtagcccagaatgagcgctttgatgcccactatgctaagacaatgacagattgtgacttcaagtttcgttgtgaactatgagtggattatggctatactgggaaccaaggcaaactgacacagcccatcatgatctcaagtaaaatgtgatgtgttcaatctacttgttgtatgcctagaggaaatctgagctaagagaataggattggggatgtggctgaggcagagggttttatcaacgcatgtcaggaaagcaatcagtcccaacacctaaaaagaacctaaagtacaaacatgcaaaaaatagtaagataaactatattttacctgaaagaataaatgccactgggaaatg

SEQ ID NO: 202 - DNA, 2094 bp, Rattus norvegicus (Norway rat)
ggcacgagctccgatctccgctgagaggctcctgggggccggggctccgaggaaaatggttcgatgttattaaaaatgaatcttaagaagaaaaatgaatcacagcagttaaactatggagttctgctacttgtaagaagtggagaagcctgagattacatcactgacccttgatcctccactgagctaaaacaccagctggtaattgcctatgattttatagacttccctccatctgctgggtccaagtgtccgtctgactgctctggtaccggagcatctttatttctgcatctaaacttgtaaaaagcacatcgaatcttgttccccaggagaaaatcttcaatgtaaccattttcaatgtatccgatgatacaagcgcattgtaatctccaggtagaagcagctttatcagtggaaagggtttaatagaacatatcctatcatgctttttctctgccccttctcaaatcatcagcagtagaaaagagaagaaaacatgtcaggacacaaatgttattcctgggagttgcaggatcggtttgctcaagataagtcagttgtcaataagatgcaacagaaatattgggaaacgaatgaggcctttatcaaagccacagggaagaaggaagatgaacatgtcgttgcttctgatgcagacctggatgccaagctagagctgtttcattcgattcagagaacctgtttggacttgtctaaagcaattgtgctctatcaaaagagaatatgtttcttgtctcaagaagaaaatgaactgggaaaatttctccgatcccaaggcttccaggacaaaacccgagcaggaaaaatgatgcaagccacaggaaaggccctctgcttttcctcccagcaaaggttggccttgagaaaccctttgtgtcgatttcaccaagaagtagagacttttagacatcgggccatctccgatacctggctgacagtgaaccgcatggagcagtgccggacagaatatagaggggcgttattgtggatgaaggacgtgtctcaggaactggatccagacctctacaagcaaatggagaagttcaggaaggtacagacacaagtccgcctcgcgaagaagaactttgacaaattgaagatggatgtgtgtcaaaaggtggatcttcttggagcaagcagatgtaacctcttatctcacatgctagcaacatatcagaccactctgctccacttttgggagaaaacttctcacaccatggcagccatccatgagagcttcaaaggctatcaaccatatgaattcacaacgttaaagagcttacaagaccctatgaaaaagctagtcgagaaagaaaagaagaagagctcccggagggaaaaccgggaggctgtggcacaggagccgaggcagttaatttcattggaggaagagaaccagcacaaagaatcctctacttgccagaaggaggagggaaaaagcgttccgtcgtctgtagacaagagttctgcagatgatgcatgctcaggacccatagatgaactattagacgtgaaacctgaggaagcttgcctgggtcccatggcagggaccccagaacctgaaagtggggacaaggacgacctcctgctgttgaacgagatcttcagcacttccagcctggatgaaggggagttcagcagggagtgggctgcggtgttcggagacgaccggctgaaggaaccagcccccatgggggcccagggagagccagaccccaagccccagataggctctgcgttccttccttcacagcttttagaccaaaacatgaaagatctccaggcctctctccaagagcctgccaaggctgcctcggacctgactgcctggttcagcctctttgctgacctcgaccccctatcaaatcctgatgctattgggaaaaccgataaagaacacgaattgctcaatgcatgagtctgcaaccttcaacaggggagccctccggccactccgcaacacctcatccagggcttgcagaagtctaacgtgctcagtacgctgttttaatatttacatgccattttaataaaacgagagggtcaaggccctgtttctatcgctataaa

SEQ ID NO: 203 - DNA, 1507 bp, Rattus norvegicus (Norway rat)
attccggagctccggctcctccggcggggctcggtatgaggctggcaaggctgctgcggggcggcacgagcgtcaggccgctctgtgccgtcccctgcgccagccgtagtctggcctcggactcggcctcgggctccgggcccgcgtcggagagcggcgttccgggccaggtggacttctatgcgcgcttctcgccgtcgccactctccatgaagcagttcctggacttcgggtcagtaaatgcttgtgaaaagacctcgttcatgtttcttcgacaagagttgcctgttagattggcaaatataatgaaagaaataagtctccttcccgataatcttctcaggaccccatccgtacagctggtacaaagttggtatatccaaagccttcaggagctgcttgactttaaggacaagagtgctgaggatgctaaaactatttatgaattcacagacacagtgataaggatcagaaaccggcacaatgatgtcatccccaccatggcccagggtgtgactgaatacaaggagagcttcggggtggatcctgtcaccagccaaaatgttcagtactttttggatcggttctacatgagtcgcatctcaattagaatgctactcaaccagcactctttattgtttggtggaaaaggaagtccatctcatcgaaaacacattggaagcataaatccaaactgtgatgtagtcgaggttattaaagatggctatgagaatgcgagacggctttgtgatttgtattacgttaactctcctgaactagaacttgaagaactaaatgcgaaatcaccaggacagccaatacaagtggtttatgttccgtcccatctctatcacatggtgtttgaactgttcaagaacgcaatgagggccaccatggagcaccatgcagacaaaggcgtttatcccccgattcaagttcacgtcacactgggggaggaggatttgactgtgaagatgagtgaccggggaggtggtgttccgctgaggaagatcgacagactcttcaactacatgtactcaactgcaccccggcctcgtgttgagacgtcccgtgcggtgcccctggctggatttggttacggattgcccatatcacgcctctatgcacagtacttccagggagacctaaagctgtattccttagagggctacgggacggatgctgtcatctatattaaggctctgtcaacggagtccatcgaaagactccctgtgtataataaagctgcctggaagcattacagaaccaaccacgaggctgacgactggtgtgtgcccagcagagagccgaaagacatgacgacgttccgaagctcgtaactgcacatgggacgcctggcaaagccaaatgtggtttttgccaaacttggaagagagatgtatttggaaccacattgtaccaaatatgtcatgtgtgatttttcacaatcagtgtttgctaaagctcctaaaggatcaattatagcaactttattcaaaaaaaaaaa

SEQ ID NO: 204 - DNA, 1363 bp, Rattus norvegicus (Norway rat)
aacctgtcaagtccccattctaagatgtccttggaaaaaatgaaagaccttcaccttggtgaacaggacctacagccagaaaccagagaagtgaatgggattctcatgtccaagttgatgagtgataactgggacaaaatctggaacttccaagcaaagcctgatgatctccttattgcaacctatgcaaaagcaggtaccacctggacgcaggaaattgtggacatgatccaaaatgatggggatgttcaaaaatgccaacgggccaacacctatgaccgacatcctttcattgagtggactttgccttcacccctcaactcaggtctggatctggctaacaaaatgccatcacctagaaccctgaagactcatctgcctgttcatatgctgccaccttccttctggaaagaaaactcaaaaattatctatgtggccagaaatgccaaggactgcctggtatcttactattacttctcaagaatgaataaaatgctgcctgaccctggtaccctgggagaatacattgaacagttcaaagctggaaaagtgctgtggggctcctggtatgaccatgtaaagggatggtgggatgtgaaagaccaacaccgtattctgtatctcttctatgaagacatgaaagaggaccctaaaagagaaattaagaagatagcaaaattcctggaaaaagacatatcagaggaagttcttaataaaatcatctaccacacctcctttgatgtaatgaaggaaaacccaatggccaactataccactctaccctccagtatcatggaccactctatatctcctttcatgaggaaagggatgcctggagactggaagaactactttactgtggcacaaagtgaggattttgatgaagactaccggaggaagatggcagggagcaatattaccttccgcacagagatctgagagcagtgaggaagagagaagccctagatttcctgactatatgctttagctatttgagcttcattcctgagttttgtatgtcctgtgatactatttcatcaaaatgtaatcagaccttccacactaggtgattatccttattgatacctactatacaaccatgcacttttactgcacttacgcaaataacagataccttcactagcctgtaattgtcttgtttcacggcaaatctcatgaatagagagacacacaaaacaggttagacataagaaagtaaataagaaaagccaaacgaatgagaagtgagcactgtgcattaaccaaaggctatttaattttcttaacaattgtcttcatctgttctctttaacgaaatacctaatttgtttataaagaataaaaatgatttcttatgcaaaac

SEQ ID NO: 205 - DNA, 238 bp, Rattus norvegicus (rat)
aagactaccggaggaagatggcagggagcaatattaccttccgcacagagatctgagagcagtgaggaagagagaagccctagatttcctgactatatgctttagctatttgagcttcattcctgagttttgtatgtcctgtgatactatttcatcaaaatgtaatcagaccttccacactaggtgattatccttattgatacctactatacaaccatgcacttttactgcacttacg

SEQ ID NO: 206 - DNA, 1124 bp, Rattus norvegicus (Norway rat)
cggcacgagctaacaccctgttctcagactcctccgcgcctctccgcctgtcctcaggatcatgaaggtcgccagtagcagtgccgcggccaccgcaggccccagctgttcgctgaaggcaggcaggacggcgggcgaagtggtgcttggtctgtcggagcaaagcgttgccatctcgcgctgcgctgggacgcgcctgcccgccttgctggacgaacagcaggtgaacgttctgctctacgacatgaacggctgctactcacgcctcaaggagctggtgcctaccctgcctcagaaccgcaaagtgagcaaggtggagatactgcagcatgttatcgactacatcagggacctgcagctggagctgaactctgagtctgaagtcgcgaccgccggaggccgggggctgcccgtccgggccccgctcagcaccctgaacggcgagatcagtgccttggcggccgaggtgaggtccgagtcagagtattacattattctcctgtgggaaactaaggccacgggaggggggtgtcccccttacttctcaggagcatagttatttaggggcgaccaataggaaaaagctcgcgctttcatcgtgcctcctggagtagagaagtgggaatgcctctcccctccagttctttccagtgggtctcatgccttatctcgctctggtgttcacaggcggcatgtgttccagccgacgaccgcatcttgtgtcgctgaggcggcgcactgaggaaccagatggactccagcccttcaggaggcaagaggaaaaaaagtgctctcggttccccagagcaacccggggaaagacactaccgcggccacgggactcttgacggatctgtccagggggtagagggttgatcaacggagtctcgccctctccacctttcagcctccagagactttgaggagggggttattcaaccccgtgtgtttctgtttttttgaaaaagcagacattttttttaaatggtcacatttcgtgcttctcagatttctgagaaaatgttttgtattgtatattacaatgatcactggctgagaatattgttttacaatagttcttatgggggtgggttttttgttgttattaaacaaacactttagat

SEQ ID NO: 207 - DNA, 2015 bp, Rattus norvegicus (Norway rat)
gcagagcatcagaggcccagctagagggacaacacagaggagtaatttgctgacagacctgcagggatggacctgctttcagctctcacactggaaacctgggtcctcctggcagtcgtcctggtgctcctctacggatttgggacccgcacacatggacttttcaagaaacaggggattcctgggcccaaacctctgcctttttttggcactgtgctgaattactatatgggtttatggaaattcgatgtggagtgccataaaaagtatggaaaaatatgggggttgtttgatggtcaaatgcctctgtttgccatcacggacacagaaatgatcaagaatgtgctagtgaaggaatgcttttctgtcttcacaaaccggcgggattttggcccagtggggattatggggaaagccatctctgtatctaaggatgaggagtggaagagatatagagccttactgtcacccacgttcaccagtggaagactcaaggagatgttccctgtcatcgaacagtatggagacattttggtaaaatacttgaggcaagagaaaggcaaacctgtccctgtgaaagaagtgtttggtgcctacagcatggatgtgatcaccagcacatcatttggagtgaatgttgattccctcaacaacccgaaggatccttttgtggagaaagccaagaagctcttaagaattgatttttttgatccgttgttcttgtcagtagtactctttccattcctcacgccagtatatgagatgttaaacatctgcatgttcccaaaagattcaatagaatttttcaaaaaatttgtgtacagaatgaaggaaacccgcctggattctgtgcagaagcatcgagtggattttcttcagctgatgatgaatgctcataatgattctaaagacaaagaatctcatacagccctatccgatatggagatcacagcccagtcaatcatttttatttttgctggatatgaacccaccagcagcacactttcctttgtcctgcattccctggccactcacccagatacacagaagaaactgcaggaggagatcgacagggctctgcccaataaggcacctcccacctatgatactgtgatggaaatggaatacctggatatggtgttgaatgaaaccctcagattgtatccaattggtaatagacttgagagagtctgtaaaaaagatgttgaaatcaatggtgtgtttatgcccaaagggtcagtggtcatgattccatcttatgctcttcaccgtgatccacagcactggccagagcctgaggaatttcgcccagaaaggttcagcaaggagaacaagggcagcattgatccttatgtatatctgccctttggaaatggacccaggaactgcattggcatgaggtttgctctcatgaatatgaaactcgctctcactaaagttctgcaaaacttctccttccagccttgtaaggaaacacagatacctctgaaattaagcagacaaggacttcttcaaccaacaaaacccattattctaaaggttgtgccacgggatgaaatcataactggatcatgattttccctcaaggagttctgctgaattcgtcagaaatgtggtgtctaagaacaccagaccctttaatttatgtcatgaataaaattcagatgaaattagggcttaatcgactttgttttgattcggtacatctttgatctttctcagtgtctacaatgtacccatctaatataaaggaaatgacaagtcagtgacagaacaggacttaacctttggtgattctcatgggactacctccatttgtttctggttgtctctgttaatttcttttgatagtaaccttgtctctgtaatttgatcaagaattttcatgaaaatgtgaactattgtgacacctttaattgtagatttggtatcagatgttttagatgcattattctacactaaatgttacatggaaaaaatgtgaataaacacttctttaaaaatccccaggggca

SEQ ID NO: 208 - DNA, 13553 bp, Rattus norvegicus (Norway rat)
gatcatccttcctgaggctcctgaatgctgaatacctgaatcccttcccacagctgttctccatccgtgagtggggaccctttaggggggctttgaatgaccctttcataggagttgcatgtacagatattctgcatataagatatttacattatatttataacagtataacagtagcaaaattatagttataaagtagcaacaaaataattttatggttgaaggttgccacaacttgattattaagggtcacagtattaggtaggttgagaacactgctttactacattctgctgaaggttctttttctttctattgtttttgtttgttcgtttgtttgttttttctgtgtgtagccctggtggtcctggaacttggtttgtagaccaggctggccttaaactcacagagatccacctcgctctggctcgcaagtgctggaactaaagatatgtgccaccatgctggactaaaggttattcttttctaaccaaagggataaccaaattcatagagctctacctgcctataaaaaagttattagtgtgtacatgtaggggggcacagtactacagtgtatgtgtgtggaggtctgaggacaattttgtggagccgtttttctttaattgcctatatgtgggtttagccatggaactctcatctttttgcatagtaagtcatttacccactgagccatttgtctgggacactccactggtgattcacattaactagttttctaactagcctgtgaagaccagctagtcccaagggttcatgttgttattccagcatttgggaagctgaggcaggagaatagacatttgaagttgttctcaatttatacaacgagtttacaaacaacctgggctacatattaccctgtctcaaacagaaaaataaatgaccgtaaaagctctgatttctgtcctccagggcctgaatttgagcaacttcatagaagacatttacttagggagaagtgatccctcacagagatttgggtaggttctaggcctttctctcaacttcaggagcaaggggcactataaactgttatttctaaagaataagtatgagggaagggaccaaaaaaatgacatcatcaaggagcacacgctggtcaagcatgggtgtaacaagttcagccagcctttggaggagggcttgggagtgggggaggggggcttgggaaaagtgtttgcccaggagagtgttgcaacattgttgcagggagcttttgacccagggtttttgccagggcatagccatgccacgctgattctctgcactctgggctgatgcatcacctgagccgattagaggatgattctggcctccttcctagagctggaaaattgtttgtttctgggaccgtctgggaagacatactgggactaaggtacaagcaaaagaggctttcactccagggaagcagtaaatcggagttctgatttccaggacgttctgattttatatattctgctccacaagtcgggcacctgttagactgggtgctccacttttggatttggaaaatatgttctacctctcatatgtaacagaaaagaagaggaagctgttcattgctttcagtgtcttagtttgagttgtgggagggagcaagaggttggacagggatggccccagtgctaggttttaatctcagataaatgatcagctccgcccagatccgcgctcaggtgagcccgtaagaggactcgcgttggaactggcgtccttctggcctcactagtttacctcttcctcctatctatgttctacgtcgggcagtctgattgtgtagcgtggtcatgtagtctgattctagtaaattctatggggtgggtttcaggagcggagaggcgccacgtgtgaaaggaaagcagacgtagctttccaaagcaggtctaccgcactggtttggtgtggcgacttacaaacgccagagataagaacgtcagttgctcccaggggagggagggaggggacgccaggtcccgggagaagtgctactgccttttgggccaacaaccccctcccacagctacccaatccagcagctggccggcccagcccctgaagcgatcaggccacagcccccagcctcgtaggttctcctcctagagctgccccgcccatctccccatcctaggccgcccacggcccctcccacttccaagactacaagtcccgtcagccccgggtcaggcatgagggcggggccacgcagcagcgaatggggaggagcctagagctcaggctagggaacgcgtgtgcccaatcgccaggctgcatggcctgtgagctgatggggggcggggaggagcccgcttgggccgggacaaaagccggatccccggcagctgcaggcggctggagcgatccggggagttggggtaagctggtgcttacggacagagagccacactcgggctttctcgaagaggtgagtactgcaatcgtaggcgcgggtgcgaccccctagtccccactaagcttcctgcttccctcccccaacccggaaccacctccgggctcgctggctggaagatcccgtgcgctccctgcacctgctcggaagttttgtgcgggtctcagctttatagcagtcttcgccccagccgcgggccgcatgtctacactgcccccccaccctcagtctttttctagttcctgggagtttgcacattgcttgccaccgaccttgcttctcctccctcctccggattgcctttgcgtgtcctgcttcttctcagctccacccaggaccagctcttgagtctcttcgggttttttgggacacttttttgggccccattcgggttcactaccggatgccggggcgggtagtagagatggcggtggctactctccccacgccggccgctcacaaggcggactcaagcaggcccgtcctcttagttctctggtgaatcccttaagctctatgtcgaagtggagcgagccggccctgaccacgcggggtcgtgctgcttaagagtgcctgaggccttgctgcgaggacttgactccggagcggcggcgctggttgggctctccctgctaaggagctccctaccggtgtagcccccaaacaacagatggtcagagtgctctggagtctggatgagacaagctcctagggtgtgtgtatatgtgttcgtgcgcgcgcgcgtgtgtgcaaaagatgctacctctccctcctgtcaggcctgacagaggtcggattcccaaagcctggtgctttctccagtcttgaagttctgccatgaggggatccctcctgatataattttggaaaggacagcataagggactttagtctgccagcccaccctgtctgtccccgctttaacattgctcagtattttgggtttctttaatatcgagagataacttcccgggaaggatcatttccacctcttagaaagctgcttaaacatccctccggaggttggggggcgaaggaggccttgaagacagagtagctgctctttttaaatctccatttaggcactgtctgctgcagcagagaattctcaagagaattttgccctgttcctttgctatagggattgcttgcttgtcgtgcccttcctcccccccttcccagcccttaaagtgagagtgttttgtccaccctaagaaacatcctcagtgggtcccagaggagctttcttttttttttttttggttctttttttcggagctggggaccgaacccagggccttgtgcttcctaggtaagcgctctaccactgagctaaatcccagcccctgaggagctttcttaaaaagcagtcttcattcattctcctttcctctgggacttgctcctggggctctgtgagtgaatgcagtcctgggtcactcactgtagaaaatagccctttcaactcaaaagcctccctttcttggagagagacagagagagagagaatgtgagtgtgtgtgttcatatatgtacgtgcatagatgcatgcccatgttggattcttaggcatggtttcccatgaagagtttgcaggttgttaccaggtagcattttgatcagcagctgagaaaggctttgggggtgtgtgcagggggtctccgatcccagattcggatgtcctttgtctcactgtccctaacgacagaagtttccatgagtttgagtgtgtgcacacttccctcgggttttccaggctttttagattctgaaaggaattatgagaccacaaggatccattgctctagagagcagcgaatcgatgactgaagttttgattgatctccactgaggcctccctggatggatgagctatactgctgagaagccaggcccttcctccagttagtctatgagccctttgtctggcctaagccacagtactctggtggcacatcttgttttggtaaactggcaaattgttcctgtatcgtctccctgttatgttgtctcctgacagaagacatccttctgcataaccccgcactaagatccgagacctaagaaaattgtgatttccttcatttgctaaggttgtcctttttccttcatctttcacttagttgggtcttgggtctcttttgggaggtactacgtcctggggactgttgtcagtttcctgtcaactgtctttatgagtaggcttggcctaggggcttcctttctcctgcagtgtgtgatcctgtttgttgaaggtgtacgagtggctggaagtggtcagtgtcgcccccctcccctttctgattaaggtgccctggcttcattctgtttgggaggtgggtaggggtgggtgtgcccattcgatttcaggaccagtttttctggtctgagtcgagaaggttgggaaatgtaagtggagtgggtgggggtggaggactctggggcagtggggctggttgggatatctcagtcagaaacaaatgaaggaggaattacaagccatcccaggagaagcccctttccagctacccactttgaaccaggtcccaagctgagtgtgcccattgtggtgaattagagacagaaggtggcggcccagccaggactagcatctgaagcctctccagcgtggcctgttgcagggagttcagtgtggccctgtgacacttggctttcctgggctaggagagaacactagccttcctggatgtgtcagcctgccagctccttaactccccctccttacgtgtacttgactttctctcttgaacaaattcaacagcttccactttgtctctttgggagaggcaggggcaacttgtctagatctaggcatgcacttggcataataatggctttcgttctccatctcatctcagtgttctccacaagcagctctggggagagagggtgtgtctgcaaggtagtgggcaggaaggatgaaagaatatgccttagagattctctggagtcgaggggggccagtcttgggagaaatggcctttctgttgggttgcagtagctgtttcctagagactcatttggaagagtgttaggacccaagtcctaactggtgagtcaggcttcttgggcaagttcattccctcccgctgaatttttgattcttggtagaagaaatgggattgtgaatcttagtggacttgaagcgctcacgtgagatttagttaatctcttccagggctggggagcaaacccagggccttatgtgtgttgggctagcactctaccaatgagcttcatttgcagctcctaagaggagtttctctacacgttaccaaagacagcttgtgccttctccccagttctggcttagtcgaggaatgactattacagagtggtccccagagagacctctgttttgcttagagggttttgctccacactaacagctaagatgactcaatgggtggatgagatgatccgtaggtcatagtttcctgccctgggactgctatgtacttggaggtgggagtctatcctagtaggaacgagctttgaggtaacttcctttcctccctcccatcccaccagggcctgtactctattagggcacaggggatatatgtgagtcagcctgggagtgggaagaaacctggggaggaaacaaggccagcagtgttctaacaggtcataggacataaagagtagttcagtgtgtctgggcccaccttcgagaacagtattcacatttggatctggctcttggagttcctagcttcccctttgatctgaatttttgctctggactgaaggtggttgtggccagctactttgcccagagggaatagagacaaggttaaggggaataagagacaaggttaaggttaagccaagaggaattgcactttttttttgttgttgttgtttgttctcccttccccttcccctccctccccctccttggctcccttcttcctttccttcctctctttctttctctttttgagaccagatctcatatggcctaggctggccttgactctgtgatccttgcccctctacctcccaggtgaggggaattatgggaagacactactgaatctggcaccaccttcatcgtttttaaaatttcttcacctccaggtctaaatctgtgctgctgacagtgaagctgcttgggccacaccttccatcccctcctgtcagggctgcctgccctttttcttcgttttgagaaaagtcaagatctagttttattgtctgggggcagctgggaatagatccaacctgttggggggaagattgtgccttggcctttcttcccaaactgaccaaccgttccccatcgtcgtccccttgcaggtaaaccaggtccctctgcagccatgtcagccaaggcaatttcagagcagaccggcaaagaactcctttacaagtacatctgtaccacctcagccatccagaaccggttcaagtatgcccgggttactcccgacacagactgggcccatctcctgcaggaccacccctggctgcttagccaggtaagcccttattttcagctcaggctctgaggaggagaaagcctttgatttgtcggaggtgtcccaaggagttccatgattgcagattcctctgtgtctgcagctggctgagcagggtcttgccttgactctgggcccttcctttggaaccagacagactggtacccagatcacacctccatttatgaaccgcgtggcctggggcgaatccatttcacttcccttgagttaggttccccacctgtcaaatagggttgacactttatgagctataaggattagcaggaacacccaggaagcatttactgtgctgtccagcagttggtagaagctcagttaaaaaaaaaaatatgcctggtgtggtggtgcctttaatcacaacacttgggaggcagaggcaggaggatctctgtgagtttgagaccagcctggtgtacaaagtgtccaggaatattacacagagaaaccctgtcttggaaagcccccctccaggctcctcccccacccaaaaaaggcttatacctacctcccttccccaaagtggaacatctcaggacatttaagaagtgggaccttcaggctagagagatggctcagtggttaagatcgagtaatcttcttgtagaggacctgggtttggctctagtttccacgttgcagcttacaaccatgggtaactctggttccaggcgagctgatgtcctctcctgcatacatgtaggcaaagaacacctacacataagaatgaatgaatatgggttcggtccccagctccgaaaaaaaaagaaccaaaaaaaaaaaaaaaaaaaagaatgaatgaataaagaaataggaccttgtactttgtgaaaatggctgatgtctgagcatggaggagatcagcctggagttgacgatcccaccatagcatttttggggtggcttcgggaagccctagacttctttggcgggcctagacaaggccttatggtgtttcgttttttcctttctgaggcagctgggatggtagtgaatttcctgtctgcctgtcccctgatggtcaagagatttggctggggtagtcaaggaaagtttccggggcaggaaagtggccctagaggataaatgtctagctagatctggaagcggggtgatcaaagctatacaatttcactgctacatccccgtttccttccccaactccttccattccagagcttggtagtcaagccggaccagctgatcaaacgtcgaggaaagcttggtctagtcggggtcaacctctctctggatggagtcaaatcctggctgaaacctcgactgggacatgaggccaccgtgagtcctggtgtggggtggggaggggtcagggtggtaacaagcagcatggtgacctctagatcaaccaacctatggctcataacctaaccagtcacatagcaacagagaaaaagatggcgtgcacactgccctggctgcagcccagtcttgccggtgagaagatcagtccactgatagtgttttagataaggtgcactgcggttgtaagcccagaacagttaggaagctagaagctgtgaccaccagcatggagatagggctcgtacttactctgagaactgcctgctctccagtttccaaattcagttgtgtgagtttgggatgacgtgcgtaccaggaggatgggagtaaaccgagatggaaaggggagccacatcattattaggcaaaaaagatacgctggtgggagagccatgggtggagacagttactaatgctgaagacttaattcagttctcccacgtccgcgattcctctcagctatgaggatgagagctgagatgaaatgtggcttaggagggttggggatttagctcagtggtagagcgcttgcttagcaactgcaaggccctgggttcagtccccagctccgaaaaaaaaaaaaaagaaatgtggcttaggtaggctaagctgtgctctgaactgtttcttctctttcacagtcttcaaggggggtgggtctgaatcttggcctagcctaggaaggatgcgtttctatctgcttggcacagaatcccgcagatactggtgcttgtctgggataggcatggtcagagaagagctgtttttttttttcctatggctgccctgggaggtggcagtacccattttcctccatgttgggcttcctcaaagcagctcctactgtttgtttccggtccttgtgggtaaagacagatctttgaagttgtgtccaggaatggagagatctgacctctgggttctcaggcccctggggagagagtggcagggctgggtactgaacagtgcccccagggagcaagcacatcatgctctcctccctgcaaactgatgggagggagatgtcacggacatctgagcttggcagcagtgtcagacctggctggagcggctcattacctctgatggatcactgtctggtccctgactcagcagtgatgcacggcaggcggggggcaggtggggggactggggatgaggcctgtctcgcctttcctgccgccagggacccactcaagctgattagctctgcaggccggctgtcttcagccaggaaacacaggaggaaaaagtttacctaatcagccttgggctctcttctctcccacccctcaaggcctagatgcatgtcctcaggctgggtcactatgtcttcctcagggcaaagtagtgtgccgtcaccatcatacccaagttcccatctcccttcttgactgcctgggctagggagattgatcagtgggcaaggtgcttgtcaccaggcctggtgacttgtgtttgatccttgggatccataaggtggagggagagaaccatcttgagttaccctcacatccccactccttgacatgacattcgtatgttcctgtcctcctccccaaacataagtaaaaatattcacgcaaagaggggatcttctaagaactccttaagttcatccgggaccccattgtcctgacttgtggacaagtcactttgccagatgtggtggtagtgcttgggccttgccttcgtgaagaatgtaccacacatctaagcggcatctccctcaatttctccttaggtcggcaaggccaaaggcttcctcaagaactttctgattgagcccttcgtcccccacagtcaggtatgtgaggcagtgccaaattggatcttcttcctccttcagctttctgattgtcctccaaaaatgttgaaaggagaggttacggtgccaaggggagaagccaagggcacaagccaagggcaccagggtctctaaagctccagctgaggcctggaggaaattatgagcaaggagtccagagatgaaggaaggcttggtttgcagcagagcagctagagcaggtaacagggacttcctgttgttggggtcaggacttgagggcaggaccccttcccaagatgggacccagttgaggaagttgaggcctgtcttttgcttgtcgcctaggagaaagtagcacgcagatcgtggggtgaatactttgtgttaggatttagaaatgagaccacagggcttgggttccactcctgggtgaagccctctgaccccttgccagttgagcacccttaccatgctctctgcatgctctgtgtccttgaaaggtggaggagttctacgtgtgcatctatgctacccgggaaggagactacgtcctgttccaccatgaagggggtgtggatgtgggcgatgtggacaccaaagcccagaagctgcttgtgggtgtggacgagaaactgaacgctgaagacattaagagacacctgttggtccacgcccccgaagacaagaaagagttgagttctgagagggacagtgtgggcacagccgggggggggacaagaagtccagtgtgacttcaggggacataggagagagaaagcagagtggaacagctggcgggcatagctctgtcttgaggaaggtagccacttgtgtggggaggctgctgccttgcaatcagtctgcagcatgccagtctcatccctcacctcttgcccctgtctgtctgtctggtgctccctctgtctctgagcttgacagcttctttccacctctgtgtgaggagtgacagccagggagcagggctggcagaggacagtgggggccaaagggtcaggcgtgaagtggggctgaactgtcagacagtgagcctgctgtgtgtaggtgacggggtgggaatgggagctgggtgcctcgtcctgcactgactgattaactggccttctttccctctcccttctagaatcctggccagcttcatctccggcctattcaatttctacgaagatctttacttcacctaccttgagatcaacccccttggtaacatgctttgtttgctgggacgggatggggatggggtgctgcccccatgcctacagtaactctggccctggtgccagaaggcagtacaaaacttctgtgggtacccagggtgtccccataagggtggtctccagtgtcacctccggtttctaagcacccgggactgtaacttattcataccataaccaactgcagcttctttctctggccctaatttgtcctgctctggggaatcctggctttggactgtctatggtgttgtctctgcctgccagttaggctccccaggctctggtctgatcctcctggtacctggaggcctctctcttgggtattggtcaatcatttactacccctaacaccaagaagagctggctgtaggctctcaagctgtgaaggaggcagatggcctggcagaatctggctaggcctctcagggcaaagtccatgaagaagggaattaccaaatttcagctgagaatgcagctcctctaatgggccagatggctgtgtgctaacttaattagctaaatggcgggggacaaatatggatgctcaggtggaggaattgcagatgaatgtgttgccgggggcccagagcactctggggtaccttgcacagacactgagacttcctcagctagaccacagaagcccgggatgtgcacaccttctggtagtagaggtttatgaatggcgtgtgatgctgtgctgctacttgggtttgaacccaaaacctagaccaacagggctcttcgtcgttggtttgggttttgctgttgttttgagttagggccaagtttagtccacactgtcctcaaacccactcactatagccgaggatgagcttgaacttctgtcctgattcccctgtgcttccgtacccggcttccacagttgttatttaagttaattttaaatggttaaagattattttattgatgtctttgtgaggatgtgtgcctatgttggccagaaaagtatgtctgacggctggagttacagttttgagctgcctcacgtgggttctggcacttgaactcatgttctgtagaggagcagcaagctctctttaactatctctcatcccctagttagtattttcttatatatttgtttatttccccccctgtgtcgcgtgtgcgcgcgtgaagcagagaggacagcctatgagagtccggtctctgctcctaccatatggcctggaggcaaatacctttctgcactgatcaatctcacagtcttttatttattctttaatatattatttggtataagggattgaacctatggcctctcccatgtactttttttttttttttttttttggttctttttttcggagctggggaccgaacccagggccttgcgcttcctaggtaagcgctctaccactgagctaaatccccagcccctcccatgtactattaaccccagaaaacagggtgtttttgtttgttcgtttgtttgtttgtttttcatgtcagggctatgggtaggccagtgcttgagtatttaaagcagggagaatggcattcttttgaagatgtcccaaaacttgctatgataactaacaggtctcgtttgacctgttttcaggtcagtgagtggggactgttctgacaggattttccttgtgctggcgacgtatcacaatacgtggttattcggtgtgtgtgagagggcactggcgggagtctggaggggtggttggagagttggtgtctgacactgttttacttttctcctagtggtgaccaaagatggtgtctacatccttgacctggcggccaaggtggacgccactgctgactacatctgcaaagtcaagtggggtgatatagagttccctcccccctttgggcgtgaggcatacccagaggtaaggcagctttgggaaggagatagagggtgatggggcctaggagacagtgactaatcctagatgatcatttggtcccctttttggctctgtatttggcaggaaaggaaagacagagagccatttaattttcttaaaaccccagtgaggttgggggtcggggtggaaatcagccaaggtcctgaatcctggccagaaacccttttagacagcgctctcagtcagcctccccgggcttctgacttgatttgctgctccttgattattccaagtggctcttcccaaccctgatgggaaggaaggttcttctcctggccactggctgagaattttaattgctgcttcccatcccatcctctgagaggtcctcccagcagg

SEQ ID NO: 209 - DNA, 2638 bp, Rattus norvegicus (Norway rat)
cacaatcttcaatgagtagacatattcctcagttctgtggtgttctcggtcacacatttatggagtttctgaagggcagtggagactactgccaggcacagcacgacctctatgcagacaagtgaactgtagaaattcattactactccaccaagaagcccccataagagtggatagcctggacacagtcgtgttgaattgaaatctgcagagcattttccaagagctcagacctggatggggtaaacctcagtgcacttcctctgtatcgcctcagtattcctggattgaagagtcactgcttcttgtgaggaggttcatttcattgcccgtttctcccgactcatactcaaagcactgagaatttcaagtggagtatattgaatattgaagtagacttcaggttgttttttggttttgttttggttttttgttttgttttgttttgttttgttttggttttcagtttttgtttggaatcatttctgtattcaattttttaattctttcataaccctattgggtgtttttttaaactaaattaacatggctcgaatgaaccgccctgctcctgtggaagtcacatacaagaacatgagatttcttattacacacaatccaaccaatgcgaccttaaacaaatttatagaggaacttaagaagtatggagttaccacaatagtaagagtatgcgaagcaacttacgacactactcttgtggagaaagaaggcattcatgttcttgactggccttttgatgatggtgcaccaccatccaaccagattgttgatgactggttaagtcttgtgaagattaagtttcgtgaagaacctggttgctgtattgctgtccattgtgtcgcaggccttggcagagctccggtgcttgttgccctagcattaattgaaggtggaatgaaatatgaagatgcagtacaattcataagacaaaagcggcgcggagcttttaacagcaagcaacttctgtacctggagaagtaccgtcctaaaatgcggctccgcttcaaggattccaacggtcatagaaacaactgttgtattcaataaaactggggtgcctgatgccattgccttggaagaggaacttcagatgggacctgatttgttatttacccaatgtgtccacttacctgtggaagctccaggggaatattgaaaaagttttaccaggccacaagcttgacagaattgcaacctctataattgggctatgatcaacacgtttggacacttagcaaaagatttttgctggtcagcatttaaaatgtgcttattatttgtaccaattgacctttcctaaaataaggtattgagtaatgtcattaaatgtactcctgtgccagaatattattagtctataaggaatttagaaggattaggtgccaaaatacccagcacaatacttgtatatttttagcatcatacagaaccaaaattccaagaactaagaactctccagaccttccatggtgtattccttcagtcatttcaaacaccgcagggcttctcttgttatctgcctgctcactctatgtttacatctcccacacttacaccagaacacatcaggtttgcttagctatcttttaagtcttgcaatgattatttaatgtctctgtcttattttgtgctgttttgggaaacctccatttgaaaatcaactttgttacagaagcacatatcttcaataatgtctccagacaaaaagccttatagttaatttaatgtttgcactcgggtgcaacctgacagggagggcctgaacaagaaaggagaggaggctattaaatatttttagtaatatgttgcctttgtcttgtgcagaacatgtagagtatgctctttaatttagtaaatatttttaagacgtagagatacattgttgtagctaaccacttaatcaaaatttctgaaattcttgtgttttccatacctatctgaggttttccaacttgtttgaattatggttttccccttctcttcccaatctcttgcaaaaaagtaaaagtgggatctgctagtgaactgagcagaaatattttatacgccttttgagctatgtaacttaataattggatacttgatcatttgttttattatgtaatcgataaaatggtgatgtgtattaatgttagttcaaccatatatttatactgtctgggaatgtgtggttatagttctgtgggagaaatagtttgtcagtgttcaccagcttgtaaaaacttagtgcgagagcttcaacatctaaataaatgatgaaacgcattcgtcactgaggtcactttgcttaaaattaacttaatttgtagaaaacagtggattcaattattatcatttcagtttatggacaaatttgttagggttaccaagtgcgtttaaaaattgctctttaaaggtctagataattgtgaatcaattgaatgttgggtaccaagggaaaacggtttgtaatagttgatgaccttgatttttaattcaattccaccagtcacttgtagctttatgcagtttccaatccacttttctcatttttaagtttattacttacctgtatatattttgaaattaatttgaacctgcgtatttggcacatgatggcttataaattttaactttc

SEQ ID NO: 210 - DNA, 711 bp, Rattus norvegicus (Norway rat)
gggactcgcacttgcaatatgactttggaggaattctcggccgcagagcagaagatcgaaaggatggacacggtgggcgatgccctggaggaagtgctcagcaaggctcggagtcagcgcaccataactgtcggcgtgtacgaggcagccaagctgctcaacgtagacccggacaacgtggtcctgtgcctgctggctgcggatgaagatgacgaccgggacgtggctctgcagatccatttcaccctcattcgtgctttctgttgcgagaacgacatcaacatcctgcgggtcagcaacccgggtcggctggcagagctgttgctactggagaacgacaagagccccgctgagagcgggggcctggcgcagaccccggacttacactgtgtgctggtgacgaacccacattcatcacaatggaaggatcctgccttaagtcaacttatttgtttttgccgggaaagtcgctacatggatcagtgggtgccagtgattaatctccccgaacggtgattccccgaacggtgatggcatctgaatggaaataactgaaccaaattgcactgaagttttgaaatacctttgtagttactcaagcagtcactccccacgctgatgcaaggattacagaaactgatgtcaaggggctgagttcaactacaggagggctaggagatgactttgcagatggacagagaggtgaaaata

SEQ ID NO: 211 - DNA, 421 bp, Rattus norvegicus (rat)
ggcgatgccctggaggaagtgctcagcaaggctcggagtcagcgcaccataactgtcggcgtgtacgaggcagccaagctgctcaacgtagacccggacaacgtggtcctgtgcctgctggctgcggatgaagatgacgaccgggacgtggctctgcagatccatttcaccctcattcgtgctttctgttgcgagaacgacatcaacatcctgcgggtcagcaacccgggtcggctggcagagctgttgctactggagaacgacaagagccccgctgagagcgggggcctggcgcagaccccggacttacactgtgtgctggtgacgaacccacattcatcacaatggaaggatcctgccttaagtcaacttatttgtttttgccgggaaagtcgctacatggatcagtgggtgccagtga

SEQ ID NO: 212 - DNA, 1215 bp, Rattus norvegicus (Norway rat)
ggcacgagagaaagcgactcttctagggaagagcagcatctgagaatgaattccaaaattcagaagatggagttaaacgatggtcactccatccctgtactgggctttggcacctatgcaaccgaagagaatctcagaaaaaagtctatggagtccacgaaaatagctatagatgttgggttccgccatattgattgttctcacttgtaccagaatgaagaagagataggtcaggccattgtaagcaagattgaagatggcactgtgaaaagggaagatatattctatacttcaaagctttggtcaacttcccatcgtccagagttggtcagacccagcttggaaaattcactgaggaaacttaatttggactatgtagacctctatctcattcatttcccggtatctctgaagccaggggatgagcttttacctcaagatgagcatggaaacttaatacttgacacagtggatctctgcgacacctgggaggccatggagaagtgtaaggatgcaggattggccaagtccatcggggtgtccaactttaaccgcaggcagctggagaagatcctgaataagccggggctcaagcacaggcctgtgtgcaaccaggtagaatgccatctttatctcaaccagagcaagctgctcgcttactgcaagatgaatgacatcgttctggttgcctatggtgccctgggaactcagagatacaaatactgtattaatgaagataccccagttctcttggatgatcccattctttgtaccatggcaaagaagtacaagcggactccagccctgattgcccttcgctaccagctggagcgtgggattgtgaccctagtcaagagtttcaatgaggagagaatcagagagaacctgcaggtctttgatttccagttggcttcagatgacatggaaattttagataacctggacagaaatcttcggtactttcctgctaatatgtttaaggctcaccctaactttccattctctgatgaatactaagatggcagccctagccatgagttctgctcgaagctcctttgtgtgatgctcgactctcagaggccaataatacaacacactgactccaatccatactgcttagcaactcacccccagtttgagctgtgtctgtacatcggggagcaaattcactaaattttcctgcttttctgtaaataaataaaaatattttgcttc

SEQ ID NO: 213 - DNA, 15438 bp, Rattus norvegicus (Norway rat)
aggagccagcgggtagtgctgaacaagactcctgttccggagcggagtaacctgcctgtgcccgctgcgacgcgcgcccacctcccggggaaggaacggcgaggcccggggccgtctccgcgatggagcgcggggccgcagcggcggcgtggatgctgttgctggcgatcgctgcctgcctggagccagtcagtagccaagaatgcggcagtgggaattttcgctgtgacaatggatactgtatccctgcgtcctggaggtgtgatgggaccagagactgtttggatgacacagatgaaattggctgtcctcccaggtcctgcgaatcaggccttttcctgtgtcctgctgaggggacctgcatccctagctcctgggtgtgtgacgaggataaggattgttcggacggtgcagacgaacagcaaaattgtgctgggaccacgtgctcggctcagcagatgacgtgctccaacggtcagtgtattccgagcgaatacaggtgcgaccatgtcagcgactgccccgacggctctgacgagagaaactgccattatccaacatgtgatcaacttacttgtgccaatggagcctgctataacacgagtcagaggtgtgaccaaaaagttgactgcagggattcctcggacgaagctaactgcactaccctgtgttcgcaaaaagaatttgaatgtggcagtggagagtgtatccttcgcgcctacgtctgtgaccatgacaatgactgcgaagataacagcgatgagcgcaattgcaactatgacacctgcggaggtcaccagttcacttgctccaatggccagtgcatcaaccagaactgggtttgtgatggagatgacgactgccaagattctggtgatgaagatggatgtgaaagtaaccagagtcatcataggtgttacccaagagaatgggcgtgtcctgggtctggacgatgcatctcaattgataaagtttgcgatggagttcctgactgtccagaaggagacgatgagaacaacgtcacaagcggaagaacctgtggtatgggtgtctgctctgtcttaaactgtgagtaccagtgccatcagacgccatttggaggagaatgcttctgccccccaggtcatattatcaacagcaatgacagccgtacttgcattgatttcgacgactgccagatatggggaatttgtgaccagaagtgtgaaaaccgacagggccgtcatcagtgcctctgtgaagaagggtatatcctggagcgagggcagcattgcaaatccagtgactccttcagtgcagcctctgttatcttctccaatggtcgggatttgctagttggagatcttcatggaagaaacttccggattctagcagagtctaagaaccgaggaatggttatgggagtggattttcactatcagaaacacagagttttttggacagaccccatgcaggaaaaggtgttttccactgacatcaatggcttaaatacccaagaaattcttaatgtttctgttgacactccagagaatctggctgtggattggattaataataaactttatctggtagagacaaaggtcaaccgcattgacgtggtcaacttggagggaaatcagcgtgttactctcataactgaaaacttagggcatcctagaggaattgcccttgatccaactgtgggctatttgtttttctcagattggggaagcctctctgggcaacccaaggtggagagagccttcatggatggtagcaatcggaaagacctggtaacaaccaaagtggggtggcctgctgggatcactctggatctggtgtccaagcgagtttactgggtggattctcgttatgactacattgaaactgtaacatatgacggaattcaaaggaagacggtagctcgtggaggctcccttgttccgcatccctttggaataagcttatttgaggaacacgtgttctttactgattggacaaagatggctgtgatgaaagccagcaagttcacagaaaccaaccctcaagtgtaccaccagtcttccctgaggcctcacggagtgacggtttaccatgccctcaggcaacccaatgccaccaatccgtgcgggagcaacaatgggggctgtgcgcaggtctgtgtcctcagtcacaggacggataatggtggcctgggctaccggtgcaagtgtgaattcggctttgaactggatgatgatgagcaccgctgtgttgccgttaagaacttcctgctcttctcatcgaaaacggctgtgcgtggaatcccattcaccctctccacccaggaagatgtcatggttcctgtcacagggagtccatccttcttcgttggaattgattttgatgcccaacacagtactgtcttctattcagatttgtcaaaagacataatttataaacaaaaaattgatggcacaggaaaagaggttatcacagcaaaccggttggaaagtgttgagtgtttgacttttgactggatctcaaggaatctttactggacagatggaggactaaagagtgtcactgtcctgaggctggctgataagtcccgacgacagataatcagcaacttaaacaaccctcgttccattgtggtgcatccgaccgctgggtatatgttcctgagtgattggttccgtcctgcaaaaattatgagagcatggagcgatggttctcacctaatgcccatagtcaatactagtctggggtggcccaatggcttggccatcgattggagtgcttcacgattgtactgggtagatgccttttttgataagattgaacacagcacccttgatggtttagatagaaaaaggctgggccatgtagaccagatgactcatccatttggactcaccgtttttaaagataatgtgttcataacagactggagactgggtgctattattcgagtgaggaaatcagatggtggtgatatgacagttattcgaagaggcatcagcagcgtaatgcacgtgaaagcctacgatgctgacctccagactgggtctaactactgcagtcagaccacccacgccaacggtgactgcagccacttctgcttcccggtcccgaacttccagcgggtgtgcggctgtccctatggaatgaagcttcagagggatcaaatgacttgtgagggagacccagcccgagagccacccacacagcagtgtggctccctctcctttccctgcaacaatggcaagtgtgtgcccagtttcttccgctgtgatggagtggacgattgccatgacaacagtgatgagcatcagtgcggggtgtttaataatacttgctcaccttcggctttcgcctgcgtccgcggtggacagtgcatccctggccagtggcactgtgacagacagaatgactgtttagacggcagtgatgagcaaaactgccccacacatgccacgtcgtccacttgcccgtccacctccttcacctgcgacaatcacgtgtgcatcccaaaagactgggtctgtgacacagacaatgattgctcggatggctcggatgaaaagaactgccaagcttcagggacctgccagcctacacagtttcggtgccctgaccaccgatgcatcagcccgctgtatgtctgtgatggggacaaggactgcgcggatgggtctgatgaggcgggctgtgtgttaaactgtacgagtgcccagttcaaatgtgccgatgggagttcttgcattaacagcaggtaccgctgcgatggggtttacgactgcagggacaactctgacgaggcaggctgccccaccaggcctcccggcatgtgccacccggatgagttccagtgccaaggagacggtacatgcatccctaacacctgggagtgtgacgggcatccagactgtatccacgggtccgacgagcacactggctgtgttcctaagacctgctcgccgactcatttcctctgtgacaatggaaactgcatctacaaagcgtggatctgtgatggggacaatgattgtagggatatgagtgatgagaaggactgtcctacccagccttttcactgtcctagcacgcagtggcagtgcccgggctacagcacctgtatcaatctgagtgccctgtgtgacggcgtctttgactgtccgaatgggactgacgagtccccactttgcaatcaagacagctgctcccattttaatggtggctgtactcatcagtgcatgcaagggcccttcggagccacatgcctatgcccattaggataccaacttgccaatgataccaagacctgtgaagatatcaatgagtgcgatattccaggcttctgcagccagcactgcgtcaacatgagaggttccttccggtgcgcttgtgatccagaatatacgctggaaagtgatgggcggacttgcaaagtcacaggatctgaaaatccgttgttagttgtagcaagtcgtgacaaaatcattgtggacaacatcactgcccacacgcacaatctctactcgttggtccaggatgtttcttttgtggttgctcttgattttgattcagtcactggtcgtgtcttctggagtgacttactgcagggtaaaacctggagtgtctttcaaaacggaacagacaagagagtggtccatgacagtggcctctctgtgacagaaatgattgcagtagattggattggtcgcaacctttactggacggactatgctcttgaaacaatcgaagtttctaaaattgatggaagtcacagaacagtactgatcagcaaaaatgtcacaaaaccgaggggactcgcgttagatcccagaatgggtgacaatgtaatgttttggtctgactggggccatcaccctcgcattgagcgagccagcatggatggcaccatgcgcacagtcattgtccaggaaaagatctactggccctgtggcttaagcatcgactaccccaaccgcctcatctacttcatggatgcctatcttgactacattgaattctgtgattacgacggacataaccgaaggcaggtcattgctagcgatttggttctccaccatccgcacgccctcactctgttcgaagactttgtgtactggactgaccgtggtactcggcaggttatgcaggccaacaagtggcatggggggaaccagtcagttgtaatgtacagcgttcaccaaccgcttggaataactgccattcatccttcaaggcaaccaccttcccggaatccatgtgcctctgcctcttgcagccatctttgcctgctttctgcacaggcgcctagacattattcttgtgcttgcccttcaggatggaacctctccgatgattctgtcaactgtgtgagaggtgaccaacctttcttgatgtccgtaagagacaatataatttttggaatctcccttgatcctgaggtgaagagcaatgatgccatggtccccatatcagggatacagcatggttatgatgttgaatttgatgactctgagcaattcatctactgggttgagaatccgggtgaaattcacagagtgaagactgatggcagcaacaggacagtgtttgctcctctgtccctgctggggtcttctttaggcctggccttggactgggtatcaaggaacatttattataccactcctgcaagtcggtccattgaggtgttgacgctcaagggagatacgaggtatggaaaaaccctgattgccaatgacggcacccccctcggagttggtttccccgttggcatagctgttgatcctgcacgtgggaaactatattggtcagaccacgggacggacagtggggttcctgccaagatcgcaagtgctaatatggatggaacatctttaaaaattctcttcactgggaacctgcagcatctggaggttgtcaccctggacattcaggagcagaagctgtactgggcagtcaccagcagaggcgtgattgagagaggaaatgtggacggtacagagaggatgatcctggtgcaccatctggcccacccatggggccttgtggtctatggctccttcctttactactctgatgaacagtatgaggtcattgagagagttgacaagtcctctgggaataacaaagtcgtcctcagagataacgttccgtacctgaggggtcttcgggtttaccaccgccgcaatgccgctgactcttccaatggctgtagcaacaaccccaacgcttgccagcagatctgcctgcccgtgccaggtggaatgttctcctgcgcctgtgccagtggctttaagctcagccctgacggtcgctcctgttctccatataactcgttcatggtcgtttccatgctgcccgcagttagaggctttagcttggagttgtctgatcactcggaggccatggtgcccgtagctggccaaggacgaaatgttctgcatgcggacgtggatgttgccaacggctttatttactggtgtgattttagcagctctgtaagatcctctaatggaattcgtagaatcaaacccgacgggtctaattttaccaacgtcgttacctatggcattggggcaaatggaatccggggtgttgcactggactgggcagcaggaaatctttattttaccaatgcctttgtgtacgaaaccctgatagaagtgttacggatcaataccacgtaccgccgtgtactcctcaaagtctcagtggatatgccccggcatattattgttgaccccaagcatagatatctcttctgggccgactatgggcagaagccaaagatcgaacgctcttttcttgactgtaccaatcgaactgtccttgtttccgaaggcattgtcacccctcggggcttggccatggaccatgacactggctatatttattgggttgatgactccttagatttaattgccaggatccatcttgatggaggagaatctcaggtggttcgctatggcagccgttacccaactccctatggcatcactgtgtttggagagtctatcatttgggtggatagaaacttgaaaaaagtcttccaagccagcaagcaaccagggaatacagatccacccgtagtgataagagataagatcaacctgctccgtgacgtgaccatctttgacgagcacgcccagcccctctcaccagcagagcttaacaataacccttgtctgcaaagcaatggtgggtgttcccacttttgctttgccttacctgagttgcctactcccagatgtggatgtgcttttgggactctgggaaatgatggcaagagctgtgctacctcccaagaagatttcctcatctattccttaaataattccctgagaagtttacactttgaccctagagaccatagcctacctttccaagtgataagtgtggcgggaactgccattgcactggattatgaccgtagaaacaatagaatcttcttcacacaaaagctaaactctctccgtggccagatttcctatgtcagcctgtattcagggagcagctctccaactgtcctgctgtcaaatataggggtgactgatggcattgcctttgattggataaatagaagaatttattacagtgacttttcaaatcagacaataaattccatggctgaagatggatccaatcgtgctgtgattgcccgtgtttccaaacccagagctattgtattagatccttgccgagggtacatgtattggactgactggggtaccaacgccaaaatcgagagagccacactgggaggaaacttccgggtccccattgtgaacaccagcttggtttggcccaatggactcgctttggaccttgagactgaccttctgtactgggcagatgctagcttgcagaaaatagaacgcagtactctcacgggcacgaaccgagaagtcgttgtcagcactgcctttcattcctttggcttgactgtctatggccagtacatttactggacagacttgtacaccagaaaaatctaccgggctaacaagtacgacgggtcagacctggtagcaatgaccacacgtttgcccacccagcctagtggtatttccacagtggtcaaaacccagcggcagcagtgtagcaatccttgtgaccagttcaacggaggatgcagccatatctgtgctccaggtccaaatggagctgagtgtcagtgtcctcacgaaggcaactggtatctggccaacgataacaagtactgcgttgtggacacggggacccgctgtaatcaactccagttcacctgcctcaatgggcattgtattaatcaggattggaaatgtgacaatgacaacgactgtggtgatggcagtgatgagcttcctacagtctgtgcctttcacacctgccgatcaacagccttcacttgtggcaacgggcgatgtgtgccataccactatcgctgtgattactacaatgactgcggggacaacagcgacgaggcaggttgcctgttcagaaactgcaacagcaccacagagttcacgtgcagcaatgggcggtgcataccgctcagttatgtctgcaatggcataaacaattgccatgacaatgacacctcggatgagaaaaactgccctccccacacttgcccgccggatttcacaaaatgccagaccacgaatatttgtgttccccgagctttcttgtgtgatggagacaatgactgtggagacgggagtgacgagaaccccatttactgcgcctcacacacatgccgcagcaacgagttccagtgcctctcccctcagcggtgtattccaagctattggttctgtgacggtgaagccgactgtgcagatggctcggatgaacctgacacttgtgggcattctgtgaacacctgcagggccagtcagttccagtgtgataatggcaggtgcatctcaggcaattgggtctgtgatggtgataacgactgtggggacatgagtgacgaggaccagcggcatcactgtgagcttcagaactgttccagcactcagtttacctgtgtcaacagcagacctcccaacaggaggtgcatcccacagtactgggtctgtgacggtgatgcggactgctcggacgccctggacgagctgcagaattgcaccatgagaacctgctctgcaggggagttcagctgtgcaaatggacgatgtgtcaggcagtcattcaggtgtgatcggcgcaatgactgtggagactacagtgatgagaggggctgctcgtacccaccctgccatgcaaatcaatttacgtgtcagaacgggcggtgtatccctaggttctttgtttgtgatgaggacaatgactgtggagatggttctgatgagcaggagcacctgtgtcacaccccagaacccacatgcccccttcatcaattccggtgtgacaacgggcactgcatcgagatggggcgagtctgtaaccatgtggacgactgctcagacaacagcgatgagaaaggctgtggcattaacgagtgcctagattcttcaatcagtcgctgtgaccacaactgtacagataccataactagtttctactgttcctgtctccctggctacaagctcatgtctgacaaacgctcttgcgtggatattgacgaatgcaaggagtcaccccagctctgtagccagaagtgtgagaatgtggtaggctcctatatttgcaagtgtgcccctggctacatccgtgagccagatgggaagagctgccggcagaatagtaacatcgagccctatctcatctttagcaaccgttactatataagaaacttaactacagatggctcatcttactccctgattttgcaaggattgggcaatgttgtggccctggactttgatagagtagaaaagaggctgtattggattgatgcagagaagcaaatcattgagaggatgtttttgaataagacaaaccgggagaccatcataaaccacaggttaagacgtgctgaaagtctggctgtagactgggtcagcagaaaactctattggttggatgccatcttggactgcctgtttgtctctgaccttgaaggtcgacaccgcaaaatgatagcccagcactgtgtggatgctaacaataccttctgctttgaacatcccaggggaattgtccttcatcctcaaagagggcatgtctactgggcagattggggtgttcacgcatacattggaaggattggcatggatggaaccaataagtctgtgatcatctctaccaagatagaatggcccaatgccatcaccattgactacaccaacgatctcttgtactgggcagatgctcacctgggttatatcgagttctctgatttggaaggtcaccaccgacacacggtgtacgatggatcactgcctcacccctttgctcttacgatttttgaagacactgttttttggacagattggaatacacggacggttgaaaagggaaacaaatatgatgggtcaggtcgagtggtgctggtgaacacaacgcacaaacccttcgacatccacgtgtaccatccataccggcagccgattatgagcaatccctgtggtaccaacaacggtggctgttctcatctgtgcctcatcaaagcgggggggagaggattcacctgcgcgtgtcccgatgacttccagaccgttcagcttcgagacagaacactctgcatgcccatgtgctccagcacgcagttcctgtgtggcaacaatgaaaagtgtatccccatatggtggaaatgtgatggccagaaagactgctctgatggttctgatgaaccagacctgtgcccacaccgcttctgccgtctggggcagttccagtgccgggatggcaactgcacgagcccccaggctctgtgcaatgctcgccaggattgtgctgatggctctgatgaagaccgtgttctctgtgagcatcaccggtgtgagtccaacgagtggcagtgcgccaacaagcgttgcatcccacagtcctggcagtgtgactcagtgaacgactgcctggataactcagatgaggacacttcgcactgcgccagcaggacctgcaggcccggccagttcaagtgtaacaatggtcgctgtatcccgcagagctggaagtgtgacgtagacaatgattgtggagactactccgatgagcccatcgacgagtgcacgaccgctgcttacaactgtgacaaccacacagaattcagctgcaagactaactaccgttgcatcccgcagtgggcggtgtgcaatggttttgatgactgcagggacaacagtgatgaacaaggctgtgaatcggtgccatgccatccttctggggatttccggtgtgcgaatcaccactgcatccctctccgctggaagtgtgacggcactgacgactgtggagataactcggatgaggaaaactgcgttcctcgggagtgctcagagagcgagtttcgatgtgctgatcagcaatgcatcccctctcgatgggtctgtgaccaagaaaatgactgtggagacaactcggatgaacgggactgtgagatgaagacctgccatcctgaacattttcagtgtacgagtggacactgtgtgcccaaggcgttggcatgcgatgggagggcagactgtctggatgcgtctgatgaatctgcttgtcctactcgctttcccaacggcacctactgcccagccgccatgttcgaatgtaaaaaccacgtgtgcatccagtcgttttggatatgtgatggggaaaatgactgtgtcgacggttccgatgaggagatccacctgtgcttcaacattccgtgtgaatcaccacagcgattccggtgtgacaacagccgctgtgtttatggccatcagctgtgcaatggtgtggatgactgcggagatggaagtgacgagaaagaagagcactgtagaaaaccaacccacaaaccgtgcacagacactgaatataagtgtagcaatgggaactgcatttcgcagcactacgtgtgtgataatgtgaatgactgcggagacctttctgatgaaactggttgcaatctaggagataacagaacgtgtgctgaaaacatatgtgaacagaactgtacccagctgagcagcggaggctttatctgctcctgcagacccgggttcaaacctagtacttcggacaaaaattcctgtcaagacatcaatgaatgtgaggagtttggcatctgcccccagagctgtcgaaacagcaaaggaagttatgaatgtttctgtgtcgatggcttcaagtctatgagtacccattatggagaacggtgtgcagctgatggaagccctcctctcttgctcctgcctgagaatgtccgaatccggaagtacaatacctcctctgagaagttctcagagtatctggaagaggaggagcatatccaaactattgactatgactgggatcccgagcacataggcctcagtgttgtctattacactgtgctggcacagggctctcaattcggtgctatcaaacgtgcctacattcccaactttgaatctggtagtaacaatcccatacgtgaagttgacctgggcttgaaatatttaatgcagccagatggattagccgtggactgggtcggaaggcatatttactggtcagatgctaagagccaacggattgaggtggctaccctcgatggaaggtaccggaagtggctgatcaccacccaactggatcagccagctgccattgctgtgaatcctaagctagggcttatgttctggactgaccagggaaaacagcccaaaatcgagtctgcctggatgaacggggaacatcgcagcgttctggtttctgagaaccttggctggccaaacggtctttccatagattacctgaatgatgaccgggtctactggagcgactccaaagaagatgtcattgaagccataaaatatgatgggactgacaggagacttatcataaatgaagcgatgaagcccttcagtctggacatcttcgaagacaagctatactgggtagctaaggaaaagggagaagtgtggagacaaaataaattcgggaaagagaacaaagagaaagtgctggtggtgaacccgtggctcactcaagttcgaatcttccatcaactgagatacaatcagtcagtgtccaacccttgcaagcaggtctgtagtcacctctgcctgctgagaccaggaggctacagctgtgcctgtccccaaggctccgacttcgtaactggcagcactgtccagtgtgatgcagccagtgaacttcccgtcaccatgcctcccccatgcaggtgcatgcacggaggaaattgctattttgatgagaatgaactccccaaatgcaagtgttccagtggctatagcggagaatactgtgaggttgggctctcgagaggcatccctccagggacgacaatggctgttctgttgaccttcgtgatagtcatcattgttggagctctggtgcttgttggactctttcactacaggaaaactggctccctcttacccactctgcccaagctgccaagcctaagcagccttgccaaaccctctgaaaatggaaatggggtgacgttcaggtcgggggctgatgtgaacatggacatcggtgtgtctcctttcggccctgagacaattattgacagatccatggcgatgaatgaacactttgtcatggaggtgggcaagcagcctgtgatatttgaaaacccaatgtatgcagccaaggacaacacttccaaagtggccctggcagttcaggggccatcaacaggcgcacaggtgactgtaccagaaaatgtggaaaaccagaattatggaaggcccatagatccttctgagatagttccagagccaaagccagcctcccctggagctgatgaaattcagggcaaaaaatggaacatcttcaaacgaaaacccaaacagacaacgaactttgagaacccaatctacgcagagatggacagtgaggtaaaggatgctgtggctgtggccccccctccgtctccttctctccctgccaaagcttcaaaaagaaatttgactccaggctacactgccacagaagacacctttaaagacactgcaaatctcgttaaagaagattccgacgtatagcctcgccagctctctagggaacatttagacactcacttttgcacatatattttttacagacaaatgaaaaagaagttaacattcaatactttataaaaaaaatatatttttctctgtttgcctataattgaaggtgtgtcgtgtgtcttttttactgatgccacttcatatttttacaattatcacgggcactgtgtatatcttggactgatgttgtctggaggtgatgctgtgaacattactggacttgtgtaaactttggaaggattatcacacctctgcccctgctaacacgaaggtgcccgttgagtgggtcgctgagctgaagaatacacgatctggtgaggaaaggaattggcctagggctttggatctgtctagagaggagataacactcatatttcctttgaaacaatacaggaattctttatgctcatttgagggcccatttttacacattggcacttaattaatagtcaacgttcaacatcacgtgtcaacctgattagtgagtgtgcagataggggccagtgttggcttcatgcgctgtagatggctcagacaacacagacggtacacagggtgactcagctggacccttctgcgctcctccgccttctgaggccagctatgttttgattgtgcttcgtccctagttgccaagtcaacatttgcacctgccgtgtcacgtcccatactgagtttctgtctcatggaacgagctcttgcttgacagaccttaaatcaacttaagcccttgcctgtcatctcaggtgtcccctaccttcgtgactggaattccgtagttgactgtatgtactaaagccagacccgtgtctccacagagcagggcgccgaacagacaccagtcgatcgaagcctcagctgggtgtctgactctgggtgcacaatgttattgtactgactatttatttcctcagttgacgacgaatagaaagggaaaacattcttcctgagcctttctcaggcctttgcctaaatccgtgcatttgtgtccgaacgtactgtacgtcccagctcttcttttgagtggttggtgtatcctctgtcacaggaagtatggcacgagcatgcgttttccacagcgagtagcattcctggttctctgtgttcaccttgcacatgtgttaatgaatgaatgggagggtgggagaatggatgaatgaaatatactactgattattttattctcgagtcctcgaaatattttgttgctcgtattttgagtacccattgtaattactttgattagaaattaaaaagctactggaaacgctgctgctggaaatttctaataaatgtgtattttatc

SEQ ID NO: 214 - DNA, 3974 bp, Rattus norvegicus (Norway rat)
tcgactacccatattccccaccagccaaccggttcctcaccaagatgtggcacccaaacatctatgaggtaagacactagaggcctgcttcaggcacactccaccacacacttctctgcctcccttgcacatgctccacccctcctctaaccctggtcactcttgcagacaggggacgtatgcatctccatccaccatcccccagttgatgacccacagagtgggagctaccctcagagcggtggaaccccacgcagaatgtcaggtgagaattgccatggaactgcaccgtgggcacccgcaaacaccctgtaccctaagatccacccttccctgctccagtcaggggttcccagagtctggggagctgagcttgcacctacggccctacaggaccatcctcctgagtgtgatctccctgctgaatgagcccaacaccttctcgcctgccaacgtggacgcctcggtgatgtacagaaaatggaaggagagcaaggggaaggaccgcgagtacacggacatcatccggtgagtgcttcctactgtgaagagtgatctggggtgtgggtggggtggggacttgttgtatgtttccattttttgcatcccgggctggatgtgtggaggactctggggcccccagagcacggagttgaccacccagggtggccaagatcccctctgccttgttgttgacttaactccatgagcaactgggctctctgggccacaccctcactgtctgacagagagcatcaatcacttgcatttcgtgcttctgaaacttagagcttttttttttttttttgcaaagtgggaagggggctgagcccactgtgagtctgtcctcagttagggaccagggctgcgacctgttgctgtctatgagtggcagtgtccacacctatcatcgcttcttagcaggagctcctggcctgtctggggccaggcagtctcccctacacccctcacgttgggtatgaagttgcacttgaggggttcagtctttgtcgcttagcttctgtgttttctgagacaggctttcatataactccgtatctccttgtggtccctctgatgtcaggatgacaacacacattcctcggaagtgaccccagtgcttgtctacacagtgacccaaacacagggcctgtcctgtccccaagcctgccctctcagagttggtacaggccgcagctcggtaggcagtgctggtctagcatgtgcacacacacagggttagtctctgtcttaggcaaggtggatgtagccagcatggtccttcatggaggtataagttactcaggaaggtctgagcgctgcactacggaggtgtccccttcaccatggtcaggtcagcaacggtcccggtcactggaagtccctgcagactgtcccctttgttttctgttcagactggctgaacagaactttgttcctcctgctcttcctcagctgagaggaaggctggctgccctagctgttctatatagttctggctgtcctggaagaggagaccctgggtctggccctgtcactgcactctccaccctcctggcagcctttaatccacttctggctgcttcctccctggatccctggcccagagcaggagcccaggctatttttaccattctgactccaggagccacttgctctgaccaggaggcctgtaccactcctggaactcaacctgagccagtatctagtcatgtccctgcctgagcacaaggacaggatagctaggagcctgtgagaaggaccttgagatggatctaggctattgggtgtgctgctgtcccacgtgcccctccaccatagccttgtccccattcccctattccttctgggcagctgaaaacagtgtctgctctgcttgactgcactgggacctgtgccccaagactctggcctgacggtggcctggcctctcaggcacctagttaattgctgcctgccctgtgcaaggaagcccttacatgttgcttcacccatggcctgtgggacctggaacctcagttgttccggaactgcccttcatcatggtgccctcaggtcaggctgcaatttgttgttggtgtgaggaggtgcatgttacctagcccacaactagggtagtgccccccacagtctgggattacagctgtttctgtggtgctgggagctggacatgggtccttatgcttacagaaggagcactctggctgcccctgttgtcggttatagccgaggtcagcctgaatctcatagtagttctcctgcctccgcctccaaggactgggtgacagaccgtctcccacagctggctgtggttacatttctgctggagttggtcactgagccactccttgtcgcctggccctctcctcccacctgctccctgcccccattcatctcatcgtcctgggccgtggcctcacccgccctgtctccccaggaagcaggtcctggggaccaaggtggacgcagagcgcgatggcgtgaagtgcccaccacgctggccgagtactgcgtgaagaccaagcgccggcgcccgacgagggctcagacctcttctacgacgactactatgaggacggtgaagtggaggaggccgacagctgctttggggatgaagaggatgactctggcaccgaggagtcctgacccacgtccctgaaataaacttacaaattttacctcagcaggacccgtgtgggcctcaggcgacagactacctcaccgaggttcaatgtgggctcccatcccatgatccttaggtcctcttaccctgtattccccatgggttttcctcggctttggagaagagctgtggtgcagggcagacaccccactcagccttcagaggatgacaagcctgggaggctgggaaccgactgcccaggggagccagagactccagcccaaagagggccagccccacagtctcctctctgcttttggtgtgtgtgaaatccaaataaaatagctttctgagaagctgagagaagcagccaggacgccggtggcactgggtactgagggctacctgggtacccaggcagggctgtgggatgggcaggaagaggtagcgatggtggcctgtttgttggggctcagtagcatacaggagccccaggcccagaagaaacttgctgcctgcaaatcccacccgcctgcatcgggcactgtggttgcgtccaccccaagcctgtgttcaggaggcctgggtcctgaggcctacaggggattggtattcccaacagtccttgtgttctgggcacttcctcagccctggaaactagtgctgcctgaggagtccctctgatacctgagctgcagcctggtgactccacagcaggggcaggctgagtgaattctctgaccacaccatgctgtgcagggcacctgcagtgaccccgtgctgagatagcagatctgctctgccacctgcatgtttacgggtgctgtggaaagaaagtgtcacttcctcttatgcgggcctgttaatgtccaaagttccagtcaacccatgccagtcagaactgatcagagaaggacacatcggaaaaaggtgttcaggcgatcctctgcccatacaatttgctgccagcctgatctacagttgcaaaaccagcgggaaggctcagtgggcaaaggcctgcaccaagcctagcagaggacccacttggctccaggtggtccctgtgggggttgaggtcagttgagacaaatcccccccccccccccggagttcaccccagtgctaaaaggagcagtgtgccaggagagggagcatcgcttggctgtagttgctgcccccagacacagggcaactttgacagcagagttgctttctaaaaccacacagcagggtgtgaaggaggaggagctgacacgtgggtaaggtgggtggtgcttggaaggccacttgtctccaccggaagagaaagtgtggggccccttcccccagggaccaccagtcctgtgccagg

SEQ ID NO: 215 - DNA, 1882 bp, Rattus norvegicus (Norway rat)
tggagtttgagcttggcgagcagctggacaacgagcgagttgggatggccaccagctggggaagcatcttgcaggatgagaagcagctggaagagttggcacagcaggccatagaccgggccctggctgagggggtgttgctgaggtccgcaaagaaccccagctcctctgacgtggtgacgtatgccccattcacgctcttcccctcaccagtgcccagcactctgctggagcaggcctatgctgtgcagatggacttcaacatcctggtagatgctgtcagccagaactccgccttcctggagcaaacactgtctagcaccatcaaaaaggatgagtatactgcccgtctctttgatatctacaagcaagtcctgaaagagggcatagcccagactgtgttcctgggcctcaatcgttcagattacatgttccagtgcagcgcagacggctccaaagccctgaaacagattgagatcaacactatctctgccagctttgggggcctggcctcccggactccggctgtgcaccgacatgttctcaatgtcctgaataagaccaacgaagcttccaagatcctgtccaacaaccccagcaagggactggccctggggatcgccaaagcctgggagctctatggctcagccaatgccgtggtgctactgattgctcaggagaaggaaaggaacatatttgaccagcgtgccatagagaacgagctgctagacaggaagatccatgtaatccgccgaagatttgaagatgtctctgaaaggggttctctagaccaaaaccgaaggctgtttatggaggaccaggaagttgctgtggtttacttccgagatggctacatgcccagtcagtataacgcacagaactgggaagctcgcctgctgctagagagatcatgtgctgccaagtgtcccgacattgccacacagctggctggcactaagaaggtgcagcaggaactgagcagggtgggcctgctggaagcgctgctcccgggccagcccgaggctgtggcccgcctccgtgccacctttgctggcctctattcactggacatgggtgaagaaggggaccaggctgtcgctgaggcccttgctgcccctagccactttgtgctgaagccccaaagagagggcggaggtaataacttctatggggaggaaatggtacacgctctggagcagctgaaagacagcgaggagagagcctcctacatcctcatggagaagattgaacctgagccttttaggaattgcttactacggcctggcagccctgcccaagtggtccagtgcatctcggagctgggtatttttggagtctatgtcagacagggaacaacacttgtgatgaacaagcatgtggggcatctgcttcgaaccaaagccattgaacatgcagatggaggtgtggcagcaggagtggcagtcctggacaacccctaccctgtgtgaagacatgttctgggcttcactcaagagaccttctatcctctgtacttggcactcctctcctgaggggctacccctgtacctgtgttaggggagggagcttgtctctttcatagacctccaggggctttagggaagggaaaatcccgggtcccttctctcagccttccatccaaggaccagaaaagctatgattccattggaagagttctggagctccccagatttggagtgggaatggaagctcctttgaggcaaaggcccacaaaccccacacatcttcattgccctctcgccagcctttccagcaggttctagtgccttgacctggggtaggaccaagtgacaggaggaagagggtagatgggcatagacttccccagctctgccctaaataaaacaatgctgattcaatg

SEQ ID NO: 216 - DNA, 810 bp, Rattus norvegicus (Norway rat)
agccgagaggtgtgagctgctacagtgcccgagttaaggggaattggaggcaggcgccgtccacagcgatatcgagacactcagagccacaggcaccatgtccgatcctggtgatgtccgacctgttccgcacaggagcaaagtatgccgtcgtctgttcggtcccgtggacagtgagcagttgagccgcgattgcgatgcgctcatggcgagctgtctccaggaggcccgagaacggtggaactttgacttcgccactgagacgccactggagggcaactacgtctgggagcgtgttcggagcccagggctgcccaagatctacctgagccctgggtcccgccgccgtgatgacctgggaggggacaagaggcccagtacctcctcggccctgctgcaggggccagggccagctccggaggaccacgtggccttgtcgctgtcttgcactctggtgtctcacgcccctgagaggcctgaagactccccgggcgggaccgggacatctcagggccgaaaacggaggcagaccagcctaacagatttctatcactccaagcgccgattggtcttctgcaagagaaagccctgaagtgcccacgggaggctcgccttcttctgctgtgggtcaggaggcctcttccccatcttctgccttagccttcattcagtgtgtcttaattattatttgtgttttaatttaaacttctcctgtatatactctgcctgccccctcccagcctccaaacttagttatttaaaaaacaaaacaaaacaatgaaattagtaggacggtaaaaaaaaaaaaaa

SEQ ID NO: 217 - DNA, 402 bp, Rattus norvegicus (Norway rat)
cggggtgtggtgaaggatgccacggagtccacagcccgagtagaattgcactctacctgccagaccatctctgtggaccgccagcggctcaccacagttgactcccagcgtccaggtggcatgacttccacctatggaaggactcccatgtatggctctcagactcccatgtatggctctggctcccgaacacccatgtatggctcccagacacctctgcaggatggtagccgcactccacattatggctcacagacacccctgcatgatggtagccgcactcctgctcagagtgggggctgggatcccaacaaccctaacacaccttccagggctgaggaggaatacgaatatgcctttgacgacgaacccaccccatccccacaagcatatggggggccg

SEQ ID NO: 218 - DNA, 1519 bp, Rattus norvegicus (Norway rat)
tgcaactgaaagcattcttagcttgccagtggcccccactgcctgcctgcctgcggaactctctagaccatagattcctcctccactctagcaagagaagatgctgtctaatttgaggatcctgctcaacaaggcagctcttagaaaggctcacacttccatggttcgaaattttcggtatgggaagccagtccagagtcaagtacagctgaaaggccgtgacctcctcaccctgaagaacttcacaggagaggagattcagtacatgctatggctctctgcagatctgaaattcaggatcaaacagaaaggagaatacttgcctttattgcaagggaaatccttagggatgatttttgagaaaagaagtactcgaacaagactgtccacagaaacaggcttcgctcttctgggaggacatccttcttttcttaccacacaagacattcacttgggcgtgaatgaaagtctcacagacacagctcgtgtgttatctagcatgacagatgcagtgttagctcgagtgtataaacaatcagatctggacatcctggctaaggaagcaaccatcccaattgtcaacggactgtcagacctgtatcatcctatccagatcctggctgattaccttacactccaggaacactatggctctctcaaaggtctcaccctcagctggataggagatgggaacaatatcctgcactccatcatgatgagtgctgcaaaattcgggatgcaccttcaagcagctactccaaagggttatgagccagatcctaatatagtcaagctagcagagcagtatgccaaggagaatggtaccaggttgtcaatgacaaatgatccactggaagcagcacgtggaggcaatgtattaattacagatacttggataagcatgggacaagaggatgagaagaaaaagcgtcttcaagctttccaaggttaccaggttacaatgaagactgctaaagtggctgcgtctgactggacgtttttacactgcttgcctagaaagccagaagaagtagatgatgaagtgttttattctccgcggtcattagtgttcccagaggcagaaaatagaaagtggacaatcatggctgtcatggtatccctgctgacagactactcacctgtgctccagaagccaaagttctgatgcctgcaagaggacgaaaaacccaaaagacaaaaaaatctgttctttagcagcagaataagtcagtttatgtagaaaagagaagaattgaaattgtaaacacatccctagtgcgtgatataattatgtaattgctttgctattgtgagaattgcttaaagcttttagtttaagtgctgggcattttattatcctgcttgacttgacttaagcactctcttcaattcacaacttctgaatgatatttgggtttcatattaattatcatacacatttccttccactaagcattaaacactatgcttacaatgcataccatctaagtcattaaatgtaatccatgcttattacctt

SEQ ID NO: 219 - DNA, 2073 bp, Rattus norvegicus (Norway rat)
gtctctgtgtggtctcgtcatcagcacagctgggcctacacgcaagcaaccatgtctaagggacctgcggttggcattgatcttggcaccacctactcctgtgtgggtgtcttccagcatggaaaggtggaaataattgccaatgaccagggtaaccgcaccacgccgagctatgttgctttcaccgacacagaacgattaattggggatgcggccaagaatcaggttgcaatgaaccccaccaacacagtttttgatgccaaacgtctgatcggacgtaggttcgatgatgctgttgttcagtctgacatgaagcactggcccttcatggtggtgaacgatgcaggcaggcccaaggtccaagtcgaatacaaaggggagacaaaaagtttctatcctgaggaagtgtcttcaatggttctgacaaaaatgaaggaaattgcagaagcttaccttggaaagactgttaccaatgccgtggtcaccgtgccagcttacttcaatgactctcagcgacaggcaacaaaagatgctggaactattgctggcctcaacgtacttcgaattatcaatgagccaactgctgctgctattgcctatggcttagataagaaggtcggggctgaaaggaatgtgctcatttttgacttgggaggtggcacttttgatgtgtcaatcctcactatcgaggatggaatttttgaagtcaaatcaacagctggagacacccacttgggcggagaagactttgacaaccgaatggtcaaccatttcattgctgagtttaagcgaaagcacaagaaggacatcagtgagaacaagagagctgtcaggcgtctccgcactgcctgtgagcgggccaagcgcaccctctcctccagcacccaagccagtattgagattgattctctctatgagggaattgacttctacacctccattacccgtgctcgatttgaggagttgaatgctgacctgttccgtggcacactggaccctgtagagaaggcccttcgagatgccaaactagacaagtcacagatccatgatattgtcctggtgggtggttctaccagaatccccaagatccagaaacttctgcaagacttcttcaatggaaaagagctgaataagagcattaaccccgatgaagctgttgcctatggtgcagctgtccaggcagccattctatctggagacaagtctgagaatgttcaggatttgctgctcttggatgtcactcctctttcccttgggattgaaactgctggtggagtcatgactgtcctcatcaagcgcaataccaccattcccaccaagcagacccagactttcaccacctactctgacaaccagccaggtgtactcatccaggtgtatgaaggtgaaagggccatgaccaaggacaacaacctgcttgggaagtttgagctcacaggcatacctccagcaccccgtggggttcctcagattgaggttacttttgacattgatgccaatggcatcctcaatgtttctgctgtagataagagcacaggaaaggagaacaagatcaccatcaccaatgacaagggccgcttgagtaaggaggatattgagcgcatggtccaagaagctgagaagtacaaagctgaggatgagaagcagagagataaggtttcctctaagaactcgctggagtcttatgctttcaacatgaaagcaactgttgaggatgagaaacttcaaggcaagatcaatgatgaagacaaacagaagattcttgacaagtgcaacgaaatcatcagctggctggataagaaccagactgcggagaaggaagaatttgagcatcagcagaaagaactggagaaggtctgcaaccctatcatcaccaagctgtaccagagtgctggtggcatgcctggaggaatgcctggtggcttccctggtggaggagctcctccatctggtggtgcttcttcaggccccaccattgaagaggtcgattaagtcaaagtagagggtatagcattgttccacagggacccaaaacaagtaacatggaataataaaactatttaaattggcacc

SEQ ID NO: 220 - DNA, 1696 bp, Rattus norvegicus (Norway rat)
cgctgaacgctctcatcatcctaccgtcatgtctaagtcagagtcccccaaggaaccggaacagctgcggaagctcttcattggagggctgagcttcgaaacaaccgacgagagtctgaggagccattttgagcaatggggaacactcaccgactgtgtggtaatgagagatccaaacaccaaaagatccagaggctttgggtttgtcacatatgccactgtggaggaagtggatgctgccatgaatgcaagaccacacaaagtggatggaagagttgtggaacctaagagagctgtgtcaagagaagattctcagagaccaggtgcccacttaactgtgaagaagatctttgttggcggtattaaagaagacactgaagaacatcacctacgagattattttgagcagtatgggaaaattgaagtgattgaaattatgactgacagaggcagtggaaaaaagaggggatttgcgtttgtcacctttgatgaccatgactctgtggataagattgttattcagaaataccatactgtgaatggccacaactgtgaagtaagaaaggctctgtgcaaacaagagatggctagtgcttcatccagccagagaggtcgaagtggttccggaaactttggtggtggtcgtggaggtggtttcggtggcaatgacaattttggtcgaggagggaacttcagtggtcgtggtggctttggtggcagccgtggtggtggtggatatggtggcagtggggatggctataatggatttggcaatgatggaagcaattttggaggtggtggaagctacaatgattttggcaattacaacaaccagtcatcaaattttggaccgatgaaaggaggaaactttggaggcaggagctctggcccttatggtggtggaggccagtactttgctaaaccacgaaaccaaggtggctatggaggttccagcagcagcagtagctatggcagtggcaggaggttctaattacagccaggaaacaaagcttagcaggagagccagagaagtgacagggaagctacaggttacaacagatttgtgaactcagccaagcacagtggtggcagggcctagctgctacaaagaagacatgttttagacaatactcatgtgtgtgggcaaaaactccaggactgtatctgtgactaattgtataacaggttattttagtttctgttctgtggaaagtgtaaagcattccaacgaagggttttactgtagacctttttcacccatgctgttgattgctaaatgtaaaagtctgatcatgacgctgaataaatgtgtcttttttttttttttttaatgtgctgtgtaaagttagtctactctgaagccatcttggtaaacttccccaacagtgtgaagttagaattccttcagggtggtgccaaattccatttggaatttatttatggttgcttgggtggagaagccattgtcttcaaaaaccttggtgttgctaaactgccagttactgttgtaacttaatgagtttcaccatttaaagggtcatccaagcaagatcacaatttggttataaaatggttgttggacacctatgaagagaaaattgaataacggtctcagataaaataagagatgggaatgaagcttgtgtatcatccattatcatgtgtactcaataaacgatttaattctcttgaatgg

SEQ ID NO: 221 - DNA, 1442 bp, Rattus norvegicus (Norway rat)
gtcccccccaccccagctgaataggctgcgttctcttggaacgcgccgcagaacgaggttctgtgaccctagccgcgttccctccttagttcctttcgcctacccacccgcgtacccgacagacccaccccgtcctgtgccaggaaagcgctgccaccggcaccatgccccacccatacccagcactgaccccggagcagaagaaggagctggctgacatcgctcaccgaattgtagctccgggcaagggcatcctggctgcagacgagtccactggaagcattgccaagcgcctgcagtccattggcaccgagaacaccgaggagaacaggcgcttctaccgccaactgctgctgactgccgatgaccgtgtgaatccctgcattggaggggtgatccttttccacgagacactgtaccagaaggcagatgatggccgtcccttcccccaagttatcaagtccaagggtggtgttgtgggcattaaggtagataagggtgtagtgcccctggctggaaccaatggcgagaccactactcaagggctggacgggctgtctgagcgctgtgcccagtataagaaggatggagccgactttgccaagtggcgctgtgtgctaaagattggggagcatactccctcgtccctcgccatcatggaaaatgccaatgttctggcccgttacgctagcatctgccagcagaatggcattgtacccattgtggagcctgaaattctccctgatggggaccatgacttgaagcgctgccagtatgtaactgagaaggtactggcagctgtctacaaggctctgagtgaccaccatgtctatctggaaggcacactgctgaagcccaacatggtcacccctggccatgcttgcacccagaaattttccaatgaggaaattgccatggcaaccgtcacagcacttcgtcgaacagtgccccctgccgtccctggggtcactttcctgtctggagggcagagtgaggaagaggcatccatcaacctcaatgctatcaacaagtgtcccctgctgaagccatgggccttgactttctcctatggccgagccctgcaggcctctgctctaaaggcttggggtgggaagaaggagaacctgaaggcagcccaggaggagtacatcaagcgagccctggccaacagcctcgcttgtcaaggaaagtacactccaagtggccagtctggagccgcagccagtgaatctctcttcatctctaaccatgcctactaaccagagctgatctaaggctgctccatcgacactccaggcccctgcctacccacttgctattgaagaggggccttcaggctctttcccatcactcttgctgccctcgtgtgtgcagtgttgtctgtgaatgctaaatctgccatcccttccagcccactgccaataaacagctatttaaggggg

SEQ ID NO: 222 - DNA, 386 bp, Rattus norvegicus (rat)
cctcaatgctatcaacaagtgtcccctgctgaagccatgggccttgactttctcctatggccgagccctgcaggcctctgctctaaaggcttggggtgggaagaaggagaacctgaaggcagcccaggaggagtacatcaagcgagccctggccaacagcctcgcttgtcaaggaaagtacactccaagtggccagtctggagccgcagccagtgaatctctcttcatctctaaccatgcctactaaccagagctgatctaaggctgctccatcgacactccaggcccctgcctacccacttgctattgaagaggggccttcaggctctttcccatcactcttgctgccctcgtgtgtgcagtgttgtctgtgaatgctaaatctg

SEQ ID NO: 223 - DNA, 8048 bp, Rattus norvegicus (Norway rat)
  misc_feature (2005)..(2005): n
  misc_feature (3503)..(3503): n
gaattcggcccaggataaacagatatataggtaaatgactggatagatacatggatttgatctctaactcaacttaggcaccatagaaaacaatccttgaattattttaataattttaaatcctagtttactgagaaacacgttgacgaggcagggcttcagcctctctgaagcagcactgcccctctgtggccacacaggaagtcttcactcagcagtttcctgacttaaggcctaggcctgaggaaatgcattgaatatttctctgggggacaatagttctgagaaggaaagagagtttgtctatgttgaggtcagttaaggatggttttctttccttccctcccagccttttctccatgcaacatcatgagtccccatctttctatcctgcctaaaaccacttccttctgggaaatgagaaaatccactcatacaaaatggaaacatcccgaggatcccggcccgcagcagctctctgcccccagaccctgtgagagagagacccaaccgcctggtcaggtgggcactcctgaggctgcagagggaagagaccaccaacactgctcacccctgcccacatccctggcccaagaggaaactgtataaggcctctgggtcctgtgggggagggcccaggagcggcaggacccctgtgcctgagagaccaccaccagaaccagaaggaaacagaccggataaacagttctctgcaccaaatcccgtggagggagagctgaaccttcagagagaaagacaagcctgggaaaccagaagagactgctctctgcacacacatctcggacgccagaggaaaaagccaaagaccatctggaaccctggtgcactgaagctcccggaaatggtgcacaggtcttcctggttgctgccgctgcagagagcccgtggtagcaccccacgagcgaacttgagcctcaggaccacaggtaagaccaacttttctgctgcaagaaagctgcctggtgaactcaagacacaggcccacaggaacagctgaagacctgtagagaggaaaaaccacacgccggaaagcagaacactctgtccccataactgactgaaagagaggaaaacaggtctacagcactcctgacacacaggcttataggacagtctagccactgtcagaaatagcagaacaaagtaacactagagataatctgatggcgaaaggcaagcgcaggaacccaagcaacagaaaccaagactacatggcaccatcggagcccaattctcccatcaaaacaaacatggaatatccaaacacaccagaaaagcaagatctagttccaaaatcatttttgatcatgatgctggaggacttcaagaaagacgtgaagaactccttagagaacaagtagaagcctacagagaggaatcgcaaaaatgcctgaaagaatcgcaaaaatccctgaaagaattccaagaaaacataaataaacaagtagaagcccatagagaggagacacaaaaatccctgaaagaattccaggaaaacataaataaacaagtagaagcccatagagaggagacacaaaaatccctgaaagaattccaggaaaacataaataaacaagtagaagcccatagagaggagacacaaaaatccctgaaaggaattccaggaaaacacaatcaaacagttgaaggaattaaaaatggaaatagaagcaatcaaaaaagaacacatggaaacaaccctggatatagaaaaccaaaagaagagacaaggagctgtagataaaagcttcaccaacagaatacaagagatggaagagagaatctcaggagcagaagattccatagaaatcattgactcaactgtcaaagataatgtaaagcggaaaaagctactggtccaaaacatacaggaaatccaggactcaatgagaagatcaaacctaaggataataggtatagaagagagtgaagactcccagctcaaaggaccagtaaatatcttcaacaaaaccatagaagaaancttccctaacctaaaaaaagagatacccatagacacacaagaagcctacagaactccaaatagattggaccagaaaagaaacacctcccgtcacataattgtcaaaacaccaaacgcacaaaataaagaaagaatattaaaaacagtaagggaaaaaggtcaagtaacatataaagggagacctatcagaatcacaccagacttctcgccagaaactatgaaggccagaagatcctggactgatgttatacagaccctaagagaacacaaatgccagcccaggttactgtatccagcaaaactctcaattaacattgatggagaaaccaagacattccatgacaaaaccaaatttacacaatatctttccacaaatccagcactacaaaggataataaatggtaaagcccaacataaggaggcaagctataccctagaagaagcaagaaactaatcgtcttggcaacaaaacaaagagaatgaaagcacacaaacataacctcacatccaaatatgaatataacgggaagcaataatcactattccttaatatctctcaacatcaatggcctcaactccccaataaaaagtcatagattaacaaactggatacacaacgaggaccctgcattctgctgcctacaggaaacacacctcagagacaaagacagacactacctcagagtgaaaggctggaaaacaaatttccaagcaaatggtcagaagaagcaagctggagtagccattctaatatcaaataaaatcaatttccaactaaaagtcatcaaaaaagataaggaaggacacttcatattcatcaaaggaaaaatccaccaagatgaactctcaatcctaaatatctatgccccaaatacaagggcacctacatacgtaaaagaaaccttactaaagctcaaagcacacattgcacctcacacaataatagtgggagatttcaacacaccactctcatcaatggacagatcatggaaacagaaattaaacagtgatgtcgacagcataagagaagtcatgagccaaatggacttaacggatatttttagaacattctatcctaaagcaaaaggatataccttcttctcagctcctcatggcactttctccaaaattgaccatataattggtcaaaaaacgggcctcaacaggtacagaaagatagaaataatcccatgcgtgctatcggaccaccacggcctaaaactggtcttcaataacaataagggaagaatgcccacatatacctggaaattgaacaatgctctactcaatgataacctggtcaaggaagaaataaagaaagaaattaaaaactttttagaatttaatgaaaatgaaggtacaacatacccaaacttatgggacacaatgaaagctgtgctaagaggaaaactcatagcgctgagtgcctgcaaaaagaaacaggaaagagcatatgtcagcagcttgacagcacacctaaaagctctagaacaaaaangaagcaaatacactgaggaggagtagaaggcaggaaataatcaaactcagagctgaaatcaaccaagtagaaacaaaaaggaccatagaaagaatcaacagaaccaaaagctggttctttgagaaaatcaacaagatagataaacccttagccagactaacgagaggacacagagagtgtgtccaaattaacaaaatcagaaatgaaaagggagacataactacagattcagaggaaattcaaaaaatcatcagatcttactataaaaacctatattcaataaaacttgaaaatcttcaggaaatggacaatttcctagacagataccacgtatcgaagttaaatcaggaacagataaaccagttaaacaaccccataactcctaaggaaatagaagcagtcattaaaggtctcccaaccaaaaagagtccaggtccagacgggtttagtgcagaattctatcaaaccttcatagaagacctcataccaatattatccaaactattccacaaaattgaaacagatggagcactaccgaattccttctacgaagccacaattactcttatacctaaaccacacaaagacacaacaaagaaagagaacttcagaccaatttcccttatgaatatcgatgcaaaaatactcaataaaattctggcaaacgaattcaagagcacatcaaaacaatcatccaccatgatcaagtaggcttcatcccaggcatgcagggatggtttaatatacggaaaaccatcaacgtgatccattatataaacaaactgaaagaacagaaccacatgatcatttcattagatgctgagaaagcatttgacaaaattcaacacccttcatgataagagtcccggaaagaataggaattcaaggcccatacctaaacatagtaaaagccatatacagcaaaccagttgctaacattaaactaaatggagagaaacttgaagcaatcccactaaaatcagggactagacaaggctgcccactctctccctacttattcaatatagttcttgaagttctagccagaccaatcagacaacaaaaggagatcaaggggatacagatcggaaaagaagaagtcaaaatatcactatttgcagatgacatgatagtatatttaagtgatcccaaaagttccaccagagaacgactaaagctgataaacaacttcagcaaagtggctgggtataaaattaactcaaataaatcagttgccttcctctatacaaaagagaaacaagccgagaaagaaattagggaaacgacacccttcataatagacccaaataatataaagtacctcggtgtgactttaaccaagcaagtaaaagatctgtacaataagaacttcaagacactgaggaaagaaattgaagaagacctcagaagatggaaagatctcccatgctcatggattggcaggattaatatagtaaaaatggccattttacccaaagcaatctacagattcaatgcaatccccatcaaaataccaatccaattcttcaaagagttagacagaacaatttgcaaattcatctggaataacaaaaaacccaggatagctaaagctatcctcaacaataaaaggacttcagggggaatcactatccctgaactcaagcagtattacagagcaatagtgataaaaactgcatggtgattggtacagagacagacagatagaccaatggaatagaactgaagacccagaaatgaacccacacacctatggtcacttgatttttgacaaaggagccaaaaccatccaatggaaaaaagatagcattttcagcaaatggtgctggttcaactggagggcaacatgtagaagaatgcagatcgatccatccttatcaccctgtacaaagcttaagtccaagtggatcaaggacctccacatcaaaccagacacactcaaactaatagaagaaaaactagggaagcatctggaacacatgagcactggaaaaaatttcctgaacaaaacaccaatggcttatgctctaagatcaagaatcgacaaatgggatctcataaaactgcaaagcttctgtaaggcaaaggacactgtggttaggacaaaacggcaaccaacagattgggaaaagatctttaccaatcctacaacagatagaggccttatatccaaaatatacaaagaactcaagaagttagaccgcaggaaacaaataaccctattaaaaatggggttcagagctaaacaaaaattcacagctgaggaatgccgaatggctgagaaacacctaaagaaatgttcaacatctttagtcataagggaaatgcaaatcaaaacaaccctgagatttcacctcacagtagtgagaatggctaagatcaaaaactcaggtgacagcagatgctggcgaggatgtggagaaagaggaacactcctccattgttggtgggattgcagactggtaaaaccattctggaaatcagtctggaggttcctcagaaaattggacattgaactgcctgaggatccagctatacctctcttgggcatatacccaaaagatgcctcaacatataaaagagacacgtgctccactatgttcattgccgccatatttataatagccagaaactggaaagaacccagatgcccttcaacagaggaatggatacagaaaatgtggtacatctacacaatggaatattactcagctatcaaaaacaacgagtttatgaaattcgtaggcaaatggttggaactggaaaatatcatcctgagtgagctaacccactcacagaaagacatacatggtatgcactcattgataagtggctattagcccaaatgcttgaattaccctagatccctagaacaaacgaaactcaagacggatgatcaaaatgtgaatgcttcactccttctttaaatgaggaaaaagaatacccttggctgggaagggagaggcaaagattaaaacagagactgaaggaacacccattcagagcctgccccacaggtggcccatacatatacagccacccaattggacaagatggatgaagcaaagaagtgcagactgacaggagccggatgtagatcgctcctgagagacacagccagaatacagcaaatacagaggcgaatgccagcagcaaaccactgaactgagaataggtcccccgttgaaggaatcagagaaagaactggaagagcttgaaggggctcaagaccccaaaagtacaacaatgtcaagcaaccagagcttccagggactaagccactacctaaatactatacatggactgaccctggactctgaccccataggtagcaatgaatatcctagtaagagcaccagtggaaggggaagccctgggtcctgctaagactggacccccagtgaactagactatggggggagggcggcaatggggggagggttgggagggggacacccataaggaaggggaggggggagggggatgtttacccggaaaccgaaagggaataacacttaaattatataagaaatactcaagttaattaaaaataataataataataataaaaagaattactcataaaataaagacaagatgatggataaaattaaaaaaacaaaaaaaacaaaaaaaaaccaaaatggaaacatgaaaatgctcactacttacaatagtgctttatgtaataagcaaatgactgcatttgacacgagttataatttattaaccccttagttagactacttgtacacatggtgattattaatccacaattattctttttcactaaaatccttatattttattctttgagattataatataatcacacaaattccctcttccctgtcatctcttcaaaaccttccatatagtcctccatgctgtcttttgaacgttatggcttcttttttatattcttgttttatattatatatatataatatatattataatatatatcatactatatatattcctcaggactgaccaatccatattggataaccaattggtgtgctcgtctcagggaaagaccatttccccaccatcagcattctcggtttccagtagttcattgtctagaatggagactgtgtgtgctttccccgtccactttagctgctgtgtttcagctcctcttgaggcagttatgttggtgagacctcatctgtgcggcttccaacattcctcagagacacagtgagttacacagtgtcacctgatcctctaactcccaccatctttcctgctgtcttctccagggtttcctgaacctcagcaggagcaggggttgtactgtagacacgcccaccttcactaggatccacagctcctcactttgatttgctgtggttttctgcaatggcttccatgtcctagtaaagtcatggagaccccataaccacgctgtactaaaccagacaatccctagctgcattctaagttcttgtccttatcccatacatgtgcatttagagagtctgcttattttgctcattatagaacgagtcaatcattctctttgagttgtaaaagctt

SEQ ID NO: 224 - DNA, 8048 bp, Rattus norvegicus (Norway rat); identical to SEQ ID NO: 223
  misc_feature (2005)..(2005): n
  misc_feature (3503)..(3503): n

SEQ ID NO: 225 - DNA, 2472 bp, Rattus norvegicus (Norway rat)
ccccgcatgtccccaagacggagtgtgtgttggttcgtactgggccagctgctgtgcagctgcgccgtggcgctgcagggcgggatgctgttcccgaaggagaccccttcgcgggaactcaaggtgctggacggcctgtggagcttccgtgccgattactcgaacaatcggttgcagggcttcgagaagcagtggtaccggcagccgctacgggagtcgggcccaaccttggacatgccggtcccttccagcttcaatgacatcacccaagaagcagagcttcggaacttcattggctgggtgtggtatgaacgggaagcagtgcttccacagcgatggacccaggacaccgacaggagagtggtgttgagaatcaacagcgcccattactatgcagttgtgtgggtgaatgggattcatgtggtggaacatgagggaggtcacctcccctttgaggctgacatcaccaagctggtccagagtgggcccctgaccaccttccgggtcaccatcgccatcaacaacacactgaccccttatacccttccaccggggaccattgtctacaagactgatccttccatgtatcccaagggttacttcgtccaggacataagcttcgacttcttcaactatgcggggctgcaccggtctgtggtcctgtacaccacccctaccacctatatcgatgatatcactgtgaccactgacgtggaccgggacgttgggctggtgaactactggatttctgtccagggcagtgaccatttccagctagaagtgcgtcttctggatgaggatggcaaaattgtggcccgtggaacagggaatgagggtcaacttaaggtgccgcgtgcccacctctggtggccttacctgatgcatgagcatccagcctacctgtactccttggaggtgacgatgacaacacctgagtctgtgtctgacttctataccctccctgtcgggattcgaacagtggctgtcacaaagagcaagttcctcataaatgggaagcctttctacttccaaggcgtcaacaagcatgaggattcagatatccgagggagaggcttcgactggcctctgctgataaaggatttcaacctcctccgttggctcggggcaaattcctttcgtaccagccactatccctactcggaggaggtacttcagctctgtgaccgatatggaattgtggtcatcgatgagtgtcccggtgtgggcatcgtgctgccccagagttttggcaacgtgtctcttcggcaccacctagaggtgatggacgagctggtgcgcagggacaaaaatcaccctgcggtcgtgatgtggtctgtggccaatgagcctgtctcttctctgaaacctgccggatattacttcaagacgctgatcgcccacaccaaagccctggaccccacccgtcctgtgacctttgtgagcaataccagatatgacgcagacatgggggccccgtacgtggacgtgatttgtgtgaacagttacttatcctggtatcatgactacgggcatctggaggtgattcagctgcagctgactagccagtttgagaactggtataagatgtaccagaagccaattatccagagcgagtatggagcagacgccgtctcggggcttcatgaggatccacctcgcatgttcagtgaggagtaccagacagctctcctggagaattatcatttgatcctggatgagaaacgaaaagaatatgtcatcggagagctcatctggaattttgctgacttcatgacgaaccagtcaccactgagagtaacaggaaacaagaaggggatcttcactcgacagagaaaccccaagatggcagccttcattttgcgagagagatactggaggattgccaacgaaaccagaggttacggttcagtgccgaggacccagtgtatgggaagcagaccgttcacattctaaagctacgactacctcaccgcagacagggcctgatgaagtgaaaggtattctctcagcagaagagtttttcctctggagtttgtgaaccaacacaaggaggactttagaagtgacatggaagttttccttgtgtggggataatgacttgcagtgccttaggctcagtaatgtgtcctgctgagaagtgtcccaggtcatttctgtcaggttttttttggccttggctttgtgtactcttgaaaacctactgtgtgaatactcacactaagagctcctggttaccggctaagggacggctcacaatttaagaatactgactgttctaccaggggttccagattcgattcctagcacccacgtggtcgttaactatgagctgttgccccatttctcaggtgatgtacgaacatacatgtggggggaggggaatagtcatacgtgtaaaatgaaaataaatctaaataaaactgttttctttcattataaaaaaaaaaaaaaaaaaccaactaatagaaacgt

SEQ ID NO: 226 - DNA, 2462 bp, Rattus norvegicus (Norway rat)
gatggctgcaccatgagcgtctctgcactgagctccacccgcttcacgggcagcatctctggcttcctccaagtggcctccgtgcttggtctgcttctgctgctggtcaaagcagtccagttctacctgcaaaggcaatggctactcaaggctttccagcagttcccatcacctcccttccactggttctttgggcacaagcagtttcaaggtgacaaagaactacagcaaattatgacatgtgtggagaatttcccaagtgcctttcctcgatggttctggggaagcaaagcctacttaattgtctatgaccctgactacatgaaggtgattctcgggcgatcagatccaaaggccaatggcgtctacagattgctagctccttggatcggatatggtttgctcttgctgaatggacaaccgtggttccagcaccggcgaatgctaaccccagccttccactatgacattctgaaaccctatgtaaaaaacatggctgactccattcgactgatgctagacaaatgggaacagctggcaggtcaagactcctctatagaaatctttcaacatatctccttaatgaccctagacactgtcatgaagtgtgccttcagccacaatggcagtgttcaggtggatggaaattacaagagctatatccaggccattgggaacttgaatgacctctttcactcccgtgtgaggaacatctttcatcagaatgataccatctataatttttcttccaatggccacttgttcaaccgtgcttgtcaacttgcccatgatcacacagatggtgtgatcaagctaaggaaggatcagctgcagaatgcgggagagctggaaaaggtcaagaagaaaagacgtttggattttctggacatcctcttacttgccagaatggagaatggggacagcttgtctgacaaggacctacgtgctgaggtggacacatttatgttcgagggtcatgacaccacagccagtggagtctcctggatcttctatgctctggccacacaccctaagcaccaacaaagatgcagagaggaagttcagagtgtcctgggggatgggtcctccattacctgggatcacctggaccagattccctacaccaccatgtgtatcaaggaggccctgaggctttacccacctgttccaggcattgtcagagaactcagcacatctgtcaccttccctgatgggcgctctttacccaagggtatccaagtcacactctccatttatggtctccaccacaacccgaaggtgtggccaaacccagaggtgtttgacccttccaggtttgcaccagactctccccgacacagccactcattcctgcccttctcaggaggagcgaggaactgcattgggaaacaatttgctatgagtgagatgaaggtgattgtggccctgaccctgctccgctttgagctactgccagatcccaccaaggtccccatccccttaccacgacttgtgctgaagtccaaaaatgggatctacctgtatctcaagaagctccactaattccgttgtggagctccgaaatctgaaatgagtttcactggcagaaagctgagttggtggtgtgactagccttcttcagaagagtgcttcagagagtcctctcctcctctcttcagtacagatcacccttctcagcactggaatattcctctgctttaaagccagcacccttcccataccccctcttctaaaagccttcccttttacaaatgttcttatgacatcatcaagaccactgaaaaactccaagataatttcccatctcaatattccttactccatctaacctactaagtcccttttgaattatgaggaataattcaatttgttccatgggctccaaaactcaaggcctgagcattattgtgaaacctttattcagcctaatatcatcttcacaagactgttacctggtacgttcatctaaatctcccctgcatagtctctctacctgactattcctcacacaagtttctttaccttccctcctttctccaataaagtgtccagtgtcctgcacaaaaagctcaaggagaactgattatcaccttctgattcgttcattgatgcattcaaattaaacctccacatagtagagactttttcaactattataaaaaccatcctgagccagacctgcagtcaacagcaagagcaggaagcgcataggaactacacctgcaaccaagctggcacaaagaccaagaattctgaagcagcccaaactcaagatgacatatttttacaagttagagaaaaatcaagatctgagttatcttgacaaactcgggatggaaagtaggagggaggggaaagcaaataaatacttccttattgtgtagcataaaaaaaccgaattcgtaggagggaggggaaagcaaataaatacttccttattgtgtagcataaaaaaaccgaat

SEQ ID NO: 227 - DNA, 982 bp, Rattus norvegicus (Norway rat)
gggagctgacagcagccacgcggggaagatggctgaggacttcggcttcttctcgtcgtcggagagcggggcccccgaggccgccgaggaggacccggcggccgccttcctggcccagcaggagagcgagattgctggcatcgagaatgactcgggtttcggggcacctgccgccagccaggtggcctctgcgcagcccggactcgcgagcgggggtggttcggaggacatggggactacagtcaatggagatgtgtttcaggaggctaacgggcctgccgatggctacgctgcgattgcccaggcggacaggttgactcaggagcctgagagcatccgcaagtggagagaggagcagaagaaaaggctgcaggagttggatgctgcctcgaaggtgaccgaacaggagtggcgggagaaggccaaaaaagacctggaggagtggaaccagcgccaaagtgaacaggttgagaagaacaagatcaacaacaggatcgctgacaaagcgttctaccagcagccagatgctgataccattggctatgtggcatcggaagaggcttttgtgaaagaatccaaggaggagaccccaggcacagagtgggagaaggtggcccagctgtgtgacttcaaccctaagagcagcaagcaatgtaaagacgtgtcccgcctgcgctcggtgctcatgtccctgaagcagacgccactgtcccgctagtgcctgtcaccacgggccttggtggggcagagcagcagctgcttcagccagggtggaacttctctggcagctgccacacacgcctgttctgttcctctgagtctctgggagctgggaagcgggacccttacccctttcacccaccctgtccttcctggtcccctgttccagcccctcatgactcctgtcagtccacttgattgtgactgtccctcctgatgtatttttcttggcttaaagggtgtgttaactctttttacactt

SEQ ID NO: 228 - DNA, 662 bp, Rattus norvegicus (Norway rat)
tttgttattacaggaaagaggatatgtgcaggagaagccctggctcgcacggagctgtttttgttcttcaccaccattttacagaattttaacctgaagtctctggttgatgtaaaagacattgacacaacaccagctatcagtggatttggccatttgccccctttttacgaggcttgttttattcctgtgcaaagggcagactctctaagctctcatctgtaatgtctcttctgagggtcctgtctacttcattcttggtactatagtagctttaactcacatatccccatttccttcggatccagtgaacatcaaacctcattgagttgagttccctgagtcaatatatagttctattcctgttccctatatcttgtgacgttccctatatcttgtgacattcccatgcagtacttacatagttagtgctaatacttgtatgacttcattactgttaatactgttttcactatataaaagcaaaatattttagaatatgagaattcagagtcatctgttcccttcatgtgctaaataaatactaatttttggaccagttcatagactcttttttttaatgggtataatgtaaggaagaagtaaagaaaacaaactctcaggagaccatatttgtcttcatttatacaaaaagggaccga

SEQ ID NO: 229 - DNA, 405 bp, Rattus norvegicus (Norway rat)
aaatatagagtggccctgagcaggcttcctcagcagattcatgattatctgaatgcatctgactgggagagacaagtagctggtgccaaggaaaaattaacttctttcatggaaaactatagaattacagataatgatgtactaattgccttagatagtgccaaaatcaacttgaatgaaaaactctctcaacttgagacatacgcgatataatttgatcagtatattagagataattatgatgcacaggacttaaaaagaactattgctcagattattgatagaatcattgaaaagctaaaaatgcttgacgaacagtatcatatccgtgtaaatctagcaaaatcaatccataatctctatttatttgttgaaaatgttgatcttaaccaaatcagtagtagt

SEQ ID NO: 230 - DNA, 1195 bp, Rattus norvegicus (Norway rat)
gatcccattctttatgaaagtccgcctagtggatatcaagggagatcctatcccaaatgagcaggtcttcatcaaagcacaagaagctggctacaccaatgctactaccactcatcagcatggcttggcaaagttctccatagataccagcagcatctcaggctattccctcaatatcaaagtctaccacaaggaggaaagttcatgtatccattcctcttgcacagcagaaagacacgcagaggaacatcatacggcctatgctgtttactccctcagcaagagctacatctaccttgacacagaagctggcgtcttgccctgcaaccagatccacacagttcaggcgcattttattctgaaggggcaggtcttgggagtgctgccacagattgttttccactacctggtcatggcccagggcagcatcctccagactggaaaccacactcatcaagtggagccaggagtatctcaagtacaaggcaacttcgccttggagatccctgtggagttcagcatggttcccgtggctaaaatgctcatctacaccatcttgcctgatggagaagtgattgcagattctgtaacgtttcaagttgaaaaatgtcttcgcaacaaagtgcacctgagcttcagcccatcccaaagtcttccagcctcacaaacccatatgcgggttacagcttctcctcagtccctctgtggcctgagagctgtggaccaaagcgtgctgctgctgaagcctgaggctgagctctccccttccttgatatatgatctaccaggtatgcaagacagcaacttcattccaagttcttatcatccatttgaagacgaatatgattgtttgatgtaccaaccaagagacactgaagagctcacatactcagtaccatatggacgagagaaggatgtctacagatatgtgagggacatgggtttaacagcattcaccaacttgaagatcaaacatcctacatattgttatgaaatgaacatggttgtactatcagcacctgctgtggaatctgaactttcaccaagagggggagagtttgaaatgatgcccttgggagtaaataaaagtccactacctaaagactcctccacacgtgaagaaccaagacagcaagataaatggaaaggaattaaaaacccataaaatttatatgttgaataaagtacgacattt

SEQ ID NO: 231 - DNA, 831 bp, Rattus norvegicus (Norway rat)
ttgacaaggacttgttccactgtctttccttcactatccctagattgccctcttctgaagaggaggagtcactcgacatcaacattgaaggggcaaagcataaattcagcgaaaggcgtgtggtgcttgtgaagaacaaagaaagtgttgtctttgtccagactgataagcccgtgtacaagccaggacagtcagttaaatttcgggttgtctctatggataaaaatctacaccccctgaatgagttgtttcctctggcttacattgaggatccgaaaatgaaccgaattatgcagtggcaggacattaagacagagaatgggcttaagcaattgtccttcagcctgtcagcagagcccattcagggcccctacaagatagtgattctcaaacagtcaggagtgaaggaagagcattccttcaccgtcatggaattcgtgcttcccagatttggtgtcgatgtgaaggtcccaaacgccatctctgtgtacgatgaaataatcaatgtgactgcctgtgcgatatatacctatgggaagcctgttccaggatgccatggaaatccttcctttagctctgagacaaagtctgcatgcaaagaagaggactccgagctagacaacaacggctgcagcacacaagaagtgaacatcactgagttccaattaaaggaaaattacctcaaaatgcaccaggctttccatgtgaatgcaactgttacagaagaagggacagggtcagagttcagtggatctggaagaattgaagtcgaaagaaccagaaacaaattcctatttctgaaagcagactcacacttcagacacgggatcc

SEQ ID NO: 232 - DNA, 2389 bp, Rattus norvegicus (Norway rat)
gtctcaggcagaggtccagactcagtggaagcagaggagagagcctgaaacctggcgagcaccatgagcaacaaatgcgatgtgatcgtggtggggggcggcatctcaggtatggcagcagccaaacttttgcatgactgtggcctcagtgtggtggttctggaagcacgagactgtgtgggaggcaggacttacacaattaggaataaaaatgttaaatatgtggaccttggaggatcttatgttgggccgacccagaatcgtatcttacgattggccaaagagctaggattggagacctataaagtgaatgaagttgagcggctgatccactttgtaaagggaaaatcatatgccttcaggggcccattcccaccagtgtggaatccaatcacttacctagattataacaacctctggagaacaatggatgagatgggccaagagattcccagtgatgctccatggaaggcaccccttgctgaagagtgggactacatgacaatgaaagagttgctagataagatctgctggaccaactctacaaagcagattgccacactctttgtgaacctatgtgtaactgcggagacccatgaggtttctgcactgtggttcctgtggtatgtgaagcagtgtgggggtacaaccagaatcatatcaacaaccaatggaggacaggagaggaaatttattggtggatctggtcaagtgagtgagcggataaaggatatccttggggacagagtgaagctggagaggccggtgatccacattgaccagacaggagaaaatgttgttgtgaaaaccctaaaccatgaaatatatgaggctaaatatgtgattagtgccatcccacctgttttgggcatgaagattcaccatagtcctcctctgcccattctaagaaaccagctgattactcgtgtgcctttgggttcagttattaagtgcatggtttattataaagaacccttctggaggaaaaaggatttctgtggaaccatggttattgaaggagaggaagctccaattgcgtacacattggatgataccaagccagatgcaggctgtgctgctataatgggatttatccttgctcacaaagctagaaaactggtacgccttactaaagaagaaagactgaggaagctctgtgagctatacgcgaaagttctgaactctcaagaagctctgcagccagtccattatgaagagaagaactggtgtgaggagcagtactccgggggctgctacacagcctacttccctcctggcatcttgacccagtatggaagggttctacgccagccagtgggcaagattttctttgcaggcaccgagacagcttcacattggagtggctacatggagggggctgtagaggctggagagagagctgccagagagattcttcatgccattgggaagattccagaggatgaaatttggcagccagaaccagaatctgtggatgtcccagcaagacccattaccaacaccttcctggagagacacttgccttctgtaccaggtctactaaagctgcttggattgaccaccatcttgtcagcaacagctcttggtttcctggcccacaaaaagggtctgtttgtacgtttctaaagatgggctttaggaccatatccacaggtttctcattcagtgtgtcacaaaagcttttggaaggagttgggataaaaatctgacaaaggtgcagagattatggagtgagaaagcacagtaacttggtctccattttggctatcttttagcatcgctgtggtccactcattttcaactttcctgcactctgaatattgagaacagatacacaggctctctcacaacctacctgccctatgcacatagttgtttttcaaaaccctatgcctttgtgcttgtctttcttctggtgtgttaggtcctcacctatatcaagttcttcatcattgtacctagaatcctgtcttgttagaaccagaaggcattagacactgtagcttattgtctactttagagttaaataaaccaaatgcaacagaagtgaaatctaaccacacaaggcctacacaaagctactggtatttgggtgactggaacacaagctgatgcttttctcacctcccaaggttcattcccctgtgatcctcctccaccttatgtcatagtcattcacggatcattgttcttgtggatttactctgtattaactggtattgtgttactcagtagattcttctaggcttgctattttgtgtagtgttgccagctgattctaatttttcttgagaatgggagtcttgtctttgtcatttcttttttgcatcttccagtatgcttccactcatagatttaagacatgcttaaataattaaaaataaagctg

SEQ ID NO: 233 - DNA, 3053 bp, Rattus norvegicus (Norway rat)
cccccgagagctttgtgaaggaggaacgctgcacacccgcctcccgcagcacacagccaaccacagctgagcgacacgcaacaagagccaatcacaaggcacttccgaaagctccaggatgcagatgtcttcagccctcacttgcctcaccctgggcctggttctggtctttgggaaagggttcgcttcaccccttccagagtcccatacagcccagcaggccaccaacttcggagtaaaagtgtttcagcatgtggtccaggcctccaaagaccgaaatgtggtcttctctccctacggcgtgtcctcggtgctggctatgctgcagctgaccacagcagggaaaacccggcagcagatccaagatgctatgggattcaatatcagtgagaggggcacagctcctgccctccgaaagctctccaaggagctcatggggtcatggaacaagaatgagatcagtactgcggacgccatctttgtccagcgggacctagagctggtccagggcttcatgccccacttcttcaagctcttccggaccacggtgaagcaggtggacttctcagaggtggaaagagccagattcatcatcaacgactgggtggagaggcacaccaaaggtatgatcagtgacttactggccaagggggctgtaaatgagctgacacgcctggtgctggtgaacgccctctatttcaacggccaatggaagacccccttcttagaggccagcacccaccagcgcctgttccacaagtctgatggtagcaccatctccgtgcccatgatggctcagaacaacaagttcaactacactgagttcaccactccggatgggcacgagtacgacatcctggaactgccctaccacggcgaaaccctcagcatgttcattgcagcaccctttgaaaaagatgtgcccctctccgccatcaccaacattttggacgctgagctcatcagacaatggaagagcaacatgaccaggctgccccgcctcctcatcctgcctaagttctctctggagactgaagtggacctcagagggcccctggagaagctgggcatgactgacatcttcagctcaacccaggccgacttcacaagtctttccgaccaagagcagctctctgtagcacaagcactacaaaaggtcaagatcgaggtgaacgagagcggcacagtggcgtcttcctccacagccattctagtctcagcccgcatggcccccacggagatggttttagaccgatcctttctctttgtggttcggcacaatccaacagagacaatcctcttcatgggccagctgatggagccttgagagtgggatgagaagcctttcctttgggacaaaactggacgtgttataagcagagactctgaagaaaagaattgttttaaggactctttggggagaaagagaaggcctttctttcttaccccggcactggtaaatctttccaaccagcctcccagacctcagactctcgaagaggaaagagtctaactccctcactagggacctatcttactaaggtctcatccaaccatagaactcacagaatctggatctgcccagcattcagcctttggacccagttcccaccaaggccccagcagggccaacccactacgccttcactcagcaaagtcttttgtgttccagtcacactctgggtacctcttgtatcgtcctccattgctatgaaggatgacccaggccaaaggaagaagcactgtcctatctcaaggtccactgtggaaatgaacaccttgcccatccccaaggggcagcagatagacagatcgaatgatcgcccgatatcaagccttctcccagctcccgtcctgccctcccttccctgacagccgccttgtgttatttcagagtgtagatgacttgtttacagcttttttcgacccacaaacttttctcattttgaaagcgtgaaagaaaggtcagatgtgcacgtgccttgctctttatcctgggtctccctgtgaggggagaggggtcctggggagattccaggggtgtgattgaatatttatcttgtttatcttatacgtttgttggggagaagaagcactattaaggagaaagccttttatttaaaccatggcatatggtgtcccatttggggtctgtatccctgtatgtcagggaggcatcactccacaaacccgcccctcgggtggcccggcgtcggggctcacactgccgcctagtggcagccgaacacgcccttgccccatccctcccccgcatcctcccccgtggctcttttccttagggatcttgccaaggtgatgcttggcagcccacggtaaaggaagggggaaaaagattaggtgggagagagagagagagagagagagagagagagagagagagagagagagagagagagagagagagagagaaagagagagagatgtttgagagagggcaaagtggtttcaaatttttccaatacattcagaagccgagtgggaaagggggctgtgtgacctaacaggacagaactttctccaattactgggtgactcagctgcactggtgactcacttcaatgtgtcatttccggctgctgtaagtgagcagtggacacgtgggggggggggggtgaggatgaaagaaacagccagctcctggtcaaccaccttagttagataatcttttttgaaagcttcctagctgggggtatgatcagaaaaccaatttactgaaaaactgcacaggaaggtaacgtgaatctaatttcatagcgggccgctctgcatccgttacatctccactggaaaaaaataatcattttctttttgtgtgtgtgtgtgtgttttagcttttctccctctccctctttctctctcatttcattatgcactggataaccatacaccgtgtaccacaggggcccaaatgtggggtcacatggtcttgaattttgtggggtacatatgcctttgtttgtttgttttcacttttgatatataaacaggtaaatgtgtttttaaaaaataataaaaatagagaatatgcagac

SEQ ID NO: 234 - DNA, 1160 bp, Rattus norvegicus (Norway rat)
ttgtcagcaagacctcgctccccttacagtaactctcatctagacgtcgcaactccgccaccatgtttgaggcacgcctgatccagggctccatcctgaagaaggtgctggaggccctcaaagacctcatcaatgaggcctgctgggacatcagttcgggcggcgtgaacctacagagcatggattcgtctcacgtctccttagtgcagcttactctgcgctccgaaggcttcgacacataccgctgcgatcgcaacctggccatgggcgtgaacctcaccagcatgtccaaaattctaaaatgtgctggtaatgaagacatcattacattaagggctgaagataatgctgataccttagcactagtatttgaagcaccaaatcaagagaaagtttcagactatgagatgaagttaatggacttagacgttgagcaacttggaatcccagaacaggagtacagctgcgtagtaaagatgccatctggtgaatttgcacgtatatgccgggaccttagccatattggagatgctgtggtgatctcctgtgcaaaggacggggtgaagttttctgcgagtggggagcttggcaatgggaacattaagttgtcccagacaagcaatgttgataaagaagaggaagctgtgtccatagagatgaatgagccagttcagctaacttttgctctgaggtacctgaactttttcacaaaagccactccactgtctcctacagtaacactcagtatgtctgcagatgtaccccttgttgtagagtataaaattgctgacatgggacacttaaagtattatttggctcccaagatcgaagatgaagaaggatcttaggcgttgctagaaattgagaaactaaacctttgacgatcgcttctgagatgccagcgtgttctgaggtcttttctgtcaccaagtttgtacctgagtattcttaaatattaaaataaaatgtagatatcttctgtaaataaccttttttttcctctccataatttgcttacagaataagctccaaagtaaaaactggttttgttaacataaatgtctctgccttacaaatactggtgattttcataaatgatcttgacgctaaatgcagttttaagaaatatttttcaatttaaataaagttaactgaatttg

SEQ ID NO: 235 - DNA, 318 bp, Rattus norvegicus (rat)
ccatattggagatgctgtggtgatctcctgtgcaaaggacggggtgaagttttctgcgagtggggagcttggcaatgggaacattaagttgtcccagacaagcaatgttgataaagaagaggaagctgtgtccatagagatgaatgagccagttcagctaacttttgctctgaggtacctgaactttttcacaaaagccactccactgtctcctacagtaacactcagtatgtctgcagatgtaccccttgttgtagagtataaaattgctgacatgggacacttaaagtattatttggctcccaagatcgaagatga

SEQ ID NO: 236 - DNA, 601 bp, Rattus norvegicus (Norway rat)
ggcggcttctctcgtctccttgctttttgcgccgcgcgtctcccggggaagcatggcgatgaaggccgtgtgcgtgctgaagggcgacggtccggtgcagggcgtcattcacttcgagcagaaggcaagtggtgaaccagtggtggtgtcaggacagattacaggattaactgaaggcgagcatgggttccatgtccatcaatatggagacaatacacaaggctgtaccactgcaggacctcattttaatcctcactctaagaaacatggcggtccagcggatgaagagaggcatgttggagacctgggcaatgtggctgctggaaaggacggtgtggccaatgtgtccattgaagatcgtgtgatctcactctcaggagagcattccatcattggccgtactatggtggtccacgagaaacaagatgacttgggcaaaggtggaaatgaagaaagtacaaagactggaaatgctggaagccgcttggcttgtggtgtgattgggattgcccaataaacattccctatgtggtctgagtctcagactcatctgctggcctgctaactgtagaaaaaaaccaaaccattaaactgtaatctt

SEQ ID NO: 237 - DNA, 1904 bp, Rattus norvegicus (Norway rat)
tcccccatcaaaaccactaaataagaaatgccctacaaccggatcttatggaggcattttctcaattgaggctttcttctttcaagttgacagaaaactaagcaggacacttccccacccttctccccactggatgagcggacgtgccctgcactgggtgaatgaggacattactgaccgctccttcctggggtttggctcctgctctcacggcagacactgaaaatcacaggctatgcgagttggagccagtttgtcccaaaccgattttagatctctgtaccctctctaggctatgctctaaggagctcgtctctagggccagccagtgctccagctgaggctgagagagatggcacacagtaggggtgctggagcagcccctccgggaagaggtctggggccatgtcaggacccggcagcctctgattgtgtcctaccctccccttccaggccttcgccccggcagctgcagtcaccaaccacagcatcctttgggtttgacctattgcgcacatgacccccaattagtcctggcagcatctcctgcccctcctgcttacattaggggctcaggcagtggatataaaaggtattgcagaacagacaagtcccacacagcaactcggtgcagacctagcagacaccatgaggaccctctctctgctcactctgctggccctgactgcattctgcctctctgacctggcaggtatgtgccctcctggttcatttctttggatagccaccctcctgaaggtctcgggatctgctttgggatggcagaagggaagggacaaactaccagagagacagacagcagggagggaacagaactaactgcactgttttctttacaggtgcaaagcccagcgactctgagtctgacaaaggtactgacagggagcctggcagaacctcagccttgcccctcaccctgtcccctaagcccccagacccctctgccttctgtctgggtgtccccactttccctcccaaacccagaattacctgatcctgtgcctctgttccacagccttcatgtccaagcaggagggcagtaaggtggtgaatagactccggcgctacctcaacaatggacttgggtgagtggggaggaggcgctgggccagggccctttgctttccatattggtagggaggacttgtgctgggtggtctctatgaactgccgagggtcccatgcctaggaccctggagcctcttgtgcagtgggaagagtgtgtgtataccccgtgttggttaatgccactgcgtattggttgacgctactatatgcttctcagagccccagccccctacccagatcccctggagcctcacagggaggtgtgtgagctcaaccccaattgtgacgagctagcggaccacattggcttccaggacgcctacaagcgcatctatggcaccaccgtttagggcatgtgttgccctggagcccaacggcagcttcagctttggctactctccaggactcgaccctccctgttccctctctctgcctcgaaagtatggacggcacagctgctccaaaataaagtccagatgaggaacggttgggctcgagtctgtccattgtggtggtggtaggggttggagaaggcttcatgttcaatcccagacagccccagtccggttcatttgcgtctttattatactgctctgtgatggatcgcaccagaggtccacagccgcctccccacagtgattcccaccacatccattatctcaccgccaacacagacacacccagacatgcagatcagaaaaggcctggtcacagtggtaagcaggtcaggcagctcacgtgtagacagagttgctgacacgtggcagtctggtcctggggcagggtgggtatgtggccctcatggaacaaagctt

SEQ ID NO: 238 - DNA, 2297 bp, Rattus norvegicus (Norway rat)
agacctgaaaggggaatttcctaaatctccaggctggacagtttgtttctccctctcacctcctataactcatctgagtcttatctccatatcacatttctaagtctcttgtactcagagtcattgtgactcttgggaggccagagccaggctgaacagagtccttccctgcagtactctatgagaatatgtctttgggtttgaaagaaaggtggtgttatcacctacattggctccagcggatcctcccccagccggaccagcccagagtccctctatagtgacagctccaatggcagcttccagtccctgactcaaggttgtcccacatacttcccaccatcacctactggctccctcacccaggaccctgcccgctcatttggcactgtgccacccagcctcagtgatgatagctccccttcttctgcttcatcatcatcatcatcttcctcctcctccttctataatgggagcccccccggaagtctacaagtggccatggaagacagcagccgagtgtcccccagcaagggcaccagcaacattaccaagcttaacggcatggtgctactgtgtaaagtgtgtggggacgtggcctcaggcttccactatggcgtgcatgcctgcgagggctgcaagggctttttccgccggagcatccagcagaacatccagtacaagcggtgtttgaaaaacgagaactgctccattgtccgtatcaatcgcaaccgctgccagcagtgtcgcttcaagaagtgtctctccgttggcatgtctagagacgctgtgcgttttggacgtatccccaagagagagaagcaacgaatgcttgctgagatgcagaacgccatgaacttggccaacaaccaactgagcagcctgtgccctctagagacctcacctgccccgcaccccacctcaggctccgtgggcccctcaccacctcctgcaccagccccgacacctttggtgggcttctctcagttcccacaacagctgacaccacccagatccccgagtcctgagcccacggtggaggatgtgatatcccaggtggccagggcccatcgagaaatcttcacctatgcccatgacaaattaggcacctcacctggcaacttcaatgccaatcatgcatcaggtagccctccggctaccactccacagtgctgggagagtcagggatgcccgtctacccccaacgacaacaaccttttggcggctcagcgtcataatgaagcactgaatggtctacgccagggcccctcctcctaccctcctacctggccttctggccctgcccaccacagctgccaccagcctaacagcaatgggcatcgcctgtgccccacccacgtatactcggccccagaaggcaaggcacctgccaacggtctacggcaaggcaacaccaagaatgttctgctggcatgtcccatgaacatgtatccccatggacgtagtggccggactgtgcaggagatctgggaagacttctctatgagcttcacacccgctgtgcgggaggtggtagaatttgccaaacagatccccggcttccgtgacctttctcagcacgaccaggtgaccctgcttaaggctggcacctttgaggtgctgatggtgcgctttgcgtcattgttcaacgtgaaggaccagacagtcatgttcctgagccgcacaacctacagcctgcaggagctcggtgccatgggcatgggtgacctgctcaatgccatgtttgacttcagcgagaagctcaactctctggcgcttactgaggaggagctgggccttttcacggcagtggtacttgtctctgcagagggctcgggaatggagaattccgcttcggtggagcagctccaggagacgctgctgggggctcttcgggctctcgtgctgaagaaccggccctcggagacttcccgcttcaccaaactgctgctcaagctgccggacctgcggaccctgaacaacatgcattccgagaagctgctgtccttccgggtggacgcccagtgacccgcccggccggccttctgccgctgcccccttgtacagaatcgaactctggacttctctctcctttacgagacgaaaaggaaaaccaaaccagaatcttatttatattgttataaaatattccaagatgagcctctggccccctgagccttcttgtaaataactcttcccccccacccccatgctcccttcctcccgtatttaaaccactcttgctctcccaccctcctctggcccctcgatttgttctgttcctgtctcaaatccaa

SEQ ID NO: 239 - DNA, 516 bp, Rattus norvegicus (rat)
aggaccagacagtcatgttcctgagccgcacaacctacagcctgcaggagctcggtgccatgggcatgggtgacctgctcaatgccatgtttgacttcagcgagaagctcaactctctggcgcttactgaggaggagctgggccttttcacggcagtggtacttgtctctgcagagggctcgggaatggagaattccgcttcggtggagcagctccaggagacgctgctgggggctcttcgggctctcgtgctgaagaaccggccctcggagacttcccgcttcaccaaactgctgctcaagctgccggacctgcggaccctgaacaacatgcattccgagaagctgctgtccttccgggtggacgcccagtgacccgcccggccggccttctgccgctgcccccttgtacagaatcgaactctggacttctctctcctttacgagacgaaaaggaaaaccaaaccagaatcttatttatattgttataaaatattccaagatgagcctctggccc

SEQ ID NO: 240 - DNA, 3291 bp, Rattus norvegicus (Norway rat)
acaatacgatagcaacatgacagttatgaagtagcaacaaaaaataaatttagggtgtgtgtgtggggggatggtcaacacaacatgaggaactgtattaaaggtcgagaagcactgctctaaaagaaaaacataggaaggactctcttcttcaatctcttacactggaactcagctaaaagcctttcccttccatctaaagcagttcccaccctctggcgtcccctggctttcagtgcattcccaggtgatctgagatcctgaagctagctattctcatcctgttgccctgggagtttcagcactcctggtacaacctgttcctcgctcctcctgctcttttcctcctccccttcctgtcttgcggcaggggccccagctgaaccctccagagagacactctccactccgtccccaaaggagaaacgcccgggggaggagcagaggagggagccacagagggcggaggccggggagctcagccagagaggggctgctggaggttgcatctgctggaaggaggtttttcccgctgcctggtaaccagctgccagaacactgagagggagagagagaggcagggagcaggggcagcagcttcttgacgtcaggaccagccaaggatcgggccagctaccccggccagcctagagtcagcggggccctcggctggagaggagacctacgcgaggcttggagcgtgagttgggggtgtgggaaccggttgtctggggcgcagcatgccccctgcccccggaccatggagatctccctggtgcccctggagaatggcagtgccatgaccctcagaggaggaggggaggcaggggcaagctgtgtgcagacccccaggggagagtgtgggtgccctccgacgtctggactcaataatcagtccaaagaaacactgttgagggggcgcacaacgctcgaggatgcgaaccagggtggacggcctttgccccctatggctcaggagctgccacaacctagaaggctatctgctgaggatgaggagggagaaggcgaccctggcctgggcacagtggaggaggaccaggctcctcaggatgcagggtcactccatcaccagcgagtcctcataaacatctccgggttgcgtttcgagacgcagctgggcaccctggcacagtttcccaacaccctcctgggggacccagccaagcgcctgcactacttcgaccccttgagaaatgaatacttcttcgaccgcaaccggcccagcttcgatggcattttgtactactaccagtctgggggccgcctgcgcaggcccgtcaatgtctccctggatgtgtttgcagatgagatccgcttttaccagctgggggacgaggccatggagcgcttccgggaggatgagggcttcatcaaggaagaggagaagcccctgccccgcaacgagttccagcgccaggtatggcttatcttcgaatacccagaaagctctgggtccgcaagagccatcgccatagtgtcggtcctggtcattctcatctctatcatcaccttctgcctggagactctgcctgagttcagggatgagcgggagctgctacgccatcccccagtgccgccccagcccccagcccctgcccctgggatcaatggcagcgtctctggagcactttcctctggccctacggtggctccactcttgcctaggacactggccgatccattcttcatcgtggagaccacatgtgtgatctggttcacttttgagttgctcgtgcgcttctttgcctgccccagcaaggcagaattctctcggaatatcatgaacatcatcgatgtcgtggccatcttcccctactttatcaccctgggcaccgagctggcagagcaacaaccagggggagggggtcagaatgggcagcaggccatgtccctagccatcctcagggtgatccgcctggtgcgggtgtttcggatcttcaagctctcccgccactccaagggactgcagatcctgggtaagaccttgcaagcatccatgcgggaactcgggctactcatcttcttcctcttcattggagtcatcctcttctccagcgctgtctacttcgcagaggcagacaatcacgggtcccatttctctagtatcccagatgccttctggtgggcagtagtcactatgaccactgtaggctatggagacatgagacccatcactgtagggggcaagatcgtgggttcactgtgcgccatagctggggtcctcaccattgccctgcctgtccccgtcatcgtctccaactttaattacttctatcatcgggagacagaccacgaggagcaggctgccctgaaggaagaacaaggcaaccagaggcgggagtctgggctggacacagggggtcaacggaaggtcagctgcagcaaggcctccttttgcaagactgggggttccctggagagttctgacagtatcagaaggggtagctgtcctctagaaaagtgtcacctcaaggccaagagcaacgtggacttgcggaggtccctgtatgccctctgtctggacactagccgtgaaacagatttgtaaagagagatccaggcagactggcaccagtgaagctggccacaggggtgccccttgagcctgggcatctgctttacaccaccgagtatttaagcccacctggtcacccaccgatgtctgcctttctttcacccttctcaccttcctgccctctaacttccccattttaactcctctttccataacccccagggtcgcctatttttaacaagtatgacattccatgacgcaggagccgttgaagtgctgagccctcactggaagatggatgcattcatagccagttttctacacccagcagagggataatcaaacaaatttgactttaaaaagcttagatcccaagagaatccatagcattccctacccgtgttccaaatttactttacatgggattacatttgtgtatgggcaaatattatttttatggccgatgactgcattttgtacagcagtgcacatgaagaatatttgggtgtgctcttaagatatactttgaattatgaaagtgttgggggggtcaccatttcctgggacactcagggacaaagaccctaaaagagttgttcaggtttctgtgttctcaagcttcttattattctgggatgtactattggtgcttctggtctaggagagagaatgttctagaagaccagcaaatctaatcttgtgactgtcttcacagaagcattttaaggatgttggaagaaggatttggagaattc

SEQ ID NO: 241 - DNA, 147 bp, Rattus norvegicus (Norway rat)
tcaatttccccaaaagccaaaaattgggagacaattttacatggactttggaaaacatttttttcctttgcattcatctctcaaacttagtttttatctttgaccaactgaacgtgaccaaaaaccaaaagtgcattcaaccttacc

SEQ ID NO: 242 - DNA, 4346 bp, Rattus norvegicus (Norway rat)
  misc_feature (31)..(31): n
ataagcgcagttccttccgccctggtctccnttggctggagacggcggaagggcggcttggtggcctccattgagatccggaggatccaaggactgtgtagctacaatgttgtcaagacttttccgtatgcatggcctctttgtggcctcccatccctgggaggtaattgtgggaacggtgacacttactatctgtatgatgtccatgaacatgttcaccggcaacaacaagatctgtggttggaattatgagtgcccaaaatttgaagaggacgtgctgagcagcgacatcatcatcctcacgataacccggtgcatcgccatcctgtacatctacttccagttccagaacctgcgtcagcttgggtcaaagtacattttgggtattgccggcctcttcacaattttctcaagtttcgtcttcagcactgtcgtcattcatttcctcgacaaagaattgacaggcttaaatgaagctttgccctttttcctgctcttgattgacctttctagagcgagtgcattggccaagtttgccctgagttcaaactcacaggatgaagtaagggagaatatagcgcgtgggatggcgatcctgggccccacgttcacccttgacgctctggtggaatgtcttgtgattggagttggcaccatgtcaggggtgcggcagcttgagatcatgtgctgctttggctgtatgtccgtgcttgccaactactttgtcttcatgacattcttcccagcctgcgtgtccctggtcctagagctttctcgggaaagccgtgagggtcgtccaatttggcagctcagccattttgccagagttttagaagaagaagagaataaaccaaacccagtaacccaaagggtcaagatgatcatgtctttaggcctggttcttgttcacgctcacagtcgctggatagctgatccttctcctcagaacagcacagcagaacagtctaaggtttccttgggtctggctgaagatgtgtccaagagaattgagccgagtgtttctctctggcagttttacctctccaagatgatcagcatggacatcgagcaagtgattaccctgagcttagcgttgcttttggctgtcaagtatattttctttgaacaagcagagacagaatcaacactctcattaaaaaatcctatcacatctcctgtcgtgaccccaaagaaagctcaagacaactgttgtagacgtgagcctctgcttgtgaggaggaaccagaagctttcgtcagtggaggaggatccaggagtgaaccaagacagaaaagttgaggttataaaacctttagtggcagaagccgagacttcgggcagagctacgtttgtgcttggcgcctctgcagccagccctccattggccctgggggcacaggagcctgggatcgaactccccagcgagcctcgacctaatgaagagtgtctacagatactggagagtgcagagaaaggtgcgaagttccttagtgatgcagagatcatccagttggtcaatgctaagcacatcccagcctacaaactggaaaccctcatggagacgcacgagcgtggtgtgtctattcgccggcagctcctctccgccaagcttgcagagccatcttctctgcagtacctgccttacagagactataattactccttggtgatgggagcttgctgtgagaacgtgatcggatatatgcccatccctgttggagtggcaggacctctgtgcctggatggaaaagagtaccaggtgccaatggcaacaacagaaggttgtcttgtggccagcacgaacagaggctgcagagcgatcagtcttggtggaggtgccagcagccgggtccttgcagatgggatgagccgaggcccagtggtgcgtcttcctcgtgcttgtgactcagcagaggtgaagagctggcttgaaacacctgaagggtttgcagtggtaaaggaggccttcgacagcacgagcagatttgcacgtctacagaaacttcacgtgacgctggcaggacgcaacctctacatccgtctccagtccaaaacgggggacgccatggggatgaacatgatttccaagggtacggagaaagcacttctgaagctgcaagagggcgtgccggagctgcagatactggcggtcagtggtaactattgcaccgacaagaaacctgctgccataaactggatcgaagggagaggaaagactgtggtttgtgaagctgtcattccagccaaggtggtgagagaagtattaaagacgactacggaagctatggttgacgtaaacattaacaagaatcttgtgggctctgccatggctggtagcataggaggctacaacctccatgctgccaacatcgtcactgccatctacattgcatgtggccaggatgcagcacagaatgtggggagttcaaactgtattacgttaatggaagcaagtggtcccacaaatgaagacttatacatcagctgtaccatgccgtctatagagatcggaaccgtgggtggtgggaccaaccttctacctcagcaagcctgcctgcagatgctaggtgttcaaggggcgtgcaaagacaatcctggagaaaatgcacggcagcttgcacgaattgtgtgtggcactgtgatggctggtgagttgtccttgatggcagcattggcagcaggacatcttgtcagaagtcacatggttcacaacagatcaaagataaatttacaagatctgcaaggaacatgcaccaagaaggcagcttgagcatcctgacatactggactgaaacacgggcattgggttctccaggactaacatgaaatctgtgaattaaaaatgtcagtgcagtgtcttgtggaagatgaacgtgatcagtgaggcaggcacctgcttggtttctggcctctttagagacgtctgcggtcctttgcacagactcctcagacgtgggaactatggttctttccgtgccgtgttctagaaaatctcatgtggatgtcatgtgctctgagcaccacagatgtgactgcagctcgtttctgaaagctgccacaagctggaagctggtgttttgacgaaatgatggatcctggtgatcagtgtggggctcacctccaatgggttaaaatggagttttaaatgacactgtagctgacagaacttctgatttttatttattcagtctgggttgtagaactttgcaatctaagtttattttttgtaaactaataattcatttggtgctggtctattgatttttggggacctacttcttcatggaagaattacttttattctcaaactacagaataatgtgctaagtagtgctaaatagttctcgacgaagaaaagagtcgctgtgttcatctcagtctttgttcagagaggcctttagctgtgcacagtctgcactaaagacacagagctcttagtgttagagcagagtacaagcaggtcggacctctcaggacttagagtgtgggagcagtttttaaagaaaacaaccattgctctaagccaactttcttgggagacattttaacttatttagctgaattctagatttcttggtaaactatcaaatctgtatatgttgtaataaagtgtctaatgctaggagtttattggaagtgtttaagaaataaaagtactcatcagcttttacacggataaaatgctctagcttgggccagagaagacctcgctcaggagcattggtccgggaaagcctggcttgcttgccgagcctaatgaagggaagtcagcctacagagccagtgatggagccacatgaatggccctggagctgtgtgccttgttcctgtggccaggagttaggtgactgaatcatttatgggctcctttggtggaccccataaaagctcttagcttccctcagggggggtcagcagagttgttgaatcttaattttttttttaatgtaccagtttgtgataaataataataaagagctccttattttgtattctatctaatgcttcgtttggtcttggaagcggacgtctgtgtagaagacggactctgaaagtgagcatcgatgacgcgcgcgcgcgcgactgacgctagtgatggctagatatgtggaaggtagcttcgtgtgtatgtaaagtttccagttgcgcctcttgtgacttttcagccagtaccattttatttacctgagcttgtcgtgggaagtggtagtaaaccgcattgagtgttgatgctggtgacttgtgatcagtgtcatcgtgctaagtccatgttttgtacaattactaaattgtatacattttgttatagaatactttttccagttgagtaattatgaaaggaagtt

SEQ ID NO: 243 - DNA, 2352 bp, Rattus norvegicus (Norway rat)
gggagcagcgagcaagcaggtcctcagcgtccagtcaccgctctaagccaggcgccatgcatcccgcgcgccccgcgctctgggcggctgcgctcaccgccctcactctgctccgcggaccgccagtggcgcgggccggcgcgggcgcggtgggcgcgggccccgtggtgcgctgcgaaccgtgcgacgcgcgtgcgctggcccagtgcgcgcctccgcccaccgcgcccgcgtgcacggagctggtgcgagaacccggctgcggctgctgcctgacttgcgcgctgcgcgaaggcgacgcgtgcggcgtctacacggagcgctgtggcaccggcctccgctgccagccgcgaccggccgagcagtatcccctgaaggcgctgctgaatggccgcgggttctgcgccaacgccagcgccgccagcaacctgagtgcctacctcccctcccagccgtctcctggaaacaccactgagtctgaggaggaccacaatgctgggagtgtggaaagccaggttgtccccagcacacatcgcgtgactgattccaagttccatccactccattcaaagatggaggtcatcataaaaggccaggctagggacagccagcgctacaaagttgactatgagtcccagagcacagacacccagaacttctcctccgagtctaagcgggagacagaatatggtccctgccgcagagaaatggaggacacactgaatcatctgaagttcctcaatgtgctgagtcccaggggcgtccacatcccaaactgtgacaagaaggggttctataagaagaaacagtgtcgcccttccaaaggcagaaagcggggcttctgctggtgcgtggacaagtacgggcagccattgccaggctatgacaccaaggggaaagacgacgtgcattgcctcagcgtgcagagccagtagataccgctgtgccacttaacgtggagctcaaatacgccttattttgcacaaaagactgccaacaacgtgatcagcagctggctataccttgatttatatttctctctctctctctctctctctctctctctctctctctctcttttgtggtgaactgaataaaaacaaacaaaacacatacaaaaacaaaaacaaaaaaaaaagccaagtttagacagatttctgaaatgcctctggttgtttaaatagtgaacttggtcatctttgtatctcgcagtagtcaaccaaaagcagtttgaattttcttgttgcttcctatgaaaaccacacgtgtactccaggccacggatgccgtcgccccctaactcacccacccactgtgggcttcagtgctgctggccctctgccttcttgatttcagaggctctgttgctgatagagaaaaaccctctttccatcccctgtaagtaagtgcaggcactgtggagaatggggaagcctggaacccagtgacccggacgtctggaagcatcctcctgaggcctctggtccttattgtgccatctctgaatcaagggcctggccctgtatctgcaagtggcctgacctacttgggaactgtgggagagaaaaatgtgttgtctctcttactaaaaatgactaagaatgttctagggcgctccgagagcccataaagacaaggacaaggaccttcctttgtcaggcagcttcctgatgacttggcccagcagaaatatcaaactccatgtgcagagatgtcgcaaataacggtgcgcttagttctccggatgacttcaagaaaacagtgttttctggcccagcctctcaaaataaaatttgttgtggggtggggctgaggggaggcagctttcaaaagagagaaggttttcatcttccttgttggagaccctggtaagaacatggagagaatcacctgtttgttgatcttggggtccttctcaaactttctttataattcatgcgtatatgcagacaaaatatgttcttaattgttaacattgtatacaacatagcccaaatatattagaatctgtactagataatcctagataaaaggttagagatgctaggtgatgtaaccacagacacgcccgaggaaaggagcctgtgtctggaggctgggccgctttccccgaggccaaggccatggtggtctggcaatacagggtgtgaggagactgtactgcatcccacggggtggacatgcgctgtacagagctttccttgagagcacaaaggaatcttgagacattctgcctgcctgtcagcttttctttatttttttaattaagtttttgggggaaaaatgtatttttgaaaagtttgtcttgcaatgtatttataaatagtaaataaagtttttttactatttaag

SEQ ID NO: 244 - DNA, 1341 bp, Rattus norvegicus (Norway rat)
ccagcaatttcatctcctagacctcatcagactctgacccagttcttgaatgactttggagacccagatgtttcagaatgcacattctggaagccaatggctactcccaccactgacaatgttgctgctgtttgcttttgcagacaggcagacgggagatcttctgaaggctgtggtgaaacgtgatcccccatggatccaggtgctcaaggacgacactgtgacgctgacgtgcgaagggacccacaatcctggaaactcttctacccagtggttccacaaccagagctccacctggggccaggtccaagccagctacacgtttaaggccacagtcaatgacagtggagaataccggtgccgaatggcgcacaccagcctcagcgaccccatacatctggaagtgatttctgactggctgctgctccagacccctcaactggtgtttgaggaaggggaaaccatcacattaaggtgccatagctggaagaacaaacagctgactaaggtcttgttgttccagaatggaaaacctgtgaggtattattatcaaagcagcaatttttcaatccccaaagccaaccacagtcacagtgggaactactactgcaaagcatatctaggaaggacaatgcatgtgtccaagcctgtcaccatcactgtccaaggttcagcaaccgcgtccaccagctctctagtgtggttccatgccgctttctgcctagtgatgtgcctcctgtttgcagtggacaccggcctgtatttctgtgtacggagaaatcttcaaacctcgggggaggactggaggaaatccctgtcagtcggaaagtacaaggctccacaggacaaatgacatcccatcgtatggctaaacagcggcagcttcttttcagccacaccgccgcttcatctacagccttcctttgaaagcaacttaccaccaggctggatatttggtcctgcaatcacaactgctaggaggctgaggcaggaggatcaccaaaggctgcccgggttttagagaagagagagtgcaagtctatcctggataacccaataagaccctgggtttagatggcttatcaggaaagagcacccattgctaagctcacagacaagaccacagattgatccctaaggacacagggcaaagggggagaacaaattcctgaaagttgtcctctgacctccacacgtccaccatggcagatgcacacaataaacaaattaaaatgtaatatatatattttaaacaagaggtggggaaaggctgggggttggtggcacagtttttatccaggacacatgatgctctggattttgacctcctataataaaacg

SEQ ID NO: 245 - DNA, 574 bp, Rattus norvegicus (rat)
tgtttgcagtggacaccggcctgtatttctgtgtacggagaaatcttcaaacctcgggggaggactggaggaaatccctgtcagtcggaaagtacaaggctccacaggacaaatgacatcccatcgtatggctaaacagcggcagcttcttttcagccacaccgccgcttcatctacagccttcctttgaaagcaacttaccaccaggctggatatttggtcctgcaatcacaactgctaggaggctgaggcaggaggatcaccaaaggctgcccgggttttagagaagagagagtgcaagtctatcctggataacccaataagaccctgggtttagatggcttatcaggaaagagcacccattgctaagctcacagacaagaccacagattgatccctaaggacacagggcaaagggggagaacaaattcctgaaagttgtcctctgacctccacacgtccaccatggcagatgcacacaataaacaaattaaaatgtaatatatatattttaaacaagaggtggggaaaggctgggggttggtggcacagtttttatccaggacacatgatg

SEQ ID NO: 246 - DNA, 4127 bp, Rattus norvegicus (Norway rat)
agccgctgctggggaggttggggctgaggtggtggcgggcgacgggcctcgagacgcggagcgacgcggcctagcgcggcggacggccgagggaactcgggcagtcgtcccgtcccgccatggaaatggagaaggaattcgagcagatcgataaggctgggaactgggcggctatttaccaggatattcgacatgaagccagtgacttcccatgcagaatagcgaaacttcctaagaacaaaaaccggaacaggtaccgagatgtcagcccttttgaccacagtcggattaaattgcatcaggaagataatgactatatcaatgccagcttgataaaaatggaggaagcccagaggagctatatcctcacccagggccctttaccaaacacgtgcgggcacttctgggagatggtgtgggagcagaagagcaggggcgtggtcatgctcaaccgcatcatggagaaaggctcgttaaaatgtgcccagtattggccacagaaagaagaaaaagagatggtcttcgatgacaccaatttgaagctgacactgatctctgaagatgtcaagtcatattacacagtacggcagttggagttggagaacctggctacccaggaggctcgagagatcctgcatttccactacaccacctggcctgactttggagtccctgagtcacctgcctctttcctcaatttcctattcaaagtccgagagtcaggctcactcagcccagagcacggccccattgtggtccactgcagtgctggcattggcaggtcagggaccttctgcctggctgacacctgcctcttactgatggacaagaggaaagacccgtcctctgtggacatcaagaaagtgctgttggagatgcgcaggttccgcatggggctcatccagacggccgaccaactgcgcttctcctacctggctgtgatcgagggtgcaaagttcatcatgggcgactcgtcagtgcaggatcagtggaaggagctttcccatgaagacctggagcctccccctgagcacgtgcccccacctccccggccacccaaacgcacattggagcctcacaatggcaagtgcaaggagctcttctccaaccaccagtgggtgagcgaggagagctgtgaggatgaggacatcctggccagagaggaaagcagagccccctcaattgctgtgcacagcatgagcagtatgagtcaagacactgaagttaggaaacggatggtgggtggaggtcttcaaagtgctcaggcatctgtccccactgaggaagagctgtccccaaccgaggaggaacaaaaggcacacaggccagttcactggaagcccttcctggtcaacgtgtgcatggccacggccctggcgactggcgcgtacctctgttaccgggtatgttttcactgacagactgctgtgaggcatgagcgtggtgggcgctgccactgcccaggttaggatttggtctgcggcgtctaacctggtgtagaagaaacaacagcttacaagcctgtggtggaactggaagggccagccccaggaggggcatctgtgcactgggctttgaaggagcccctggtcccaagaacagagtctaatctcagggccttaacctgttcaggagaagtagaggaaatgccaaatactcttcttgctctcacctcactcctcccctttctctggttcgtttgtttttggaaaaaaaaaaaaaagaattacaacacattgttgtttttaacatttataaaggcaggtttttgttatttttagagaaaacaaaagatgctaggcactggtgagattctcttgtgccctttggcatgtgatcagattcacgatttacgtttatttccgggggagggtcccacctgtcaggactgtaaagttcctgctggcttggtcagcccccccacccccccaccccgagcttgcaggtgccctgctgtgaggagagcagcagcagaggctgcccctggacagaagcccagctctgcttccctcaggtgtccctgcgtttccatcctccttctttgtgaccgccatcttgcagatgacccagtcctcagcaccccacccctgcagatgggtttctccgagggcctgcctcagggtcatcagaggttggctgccagcttagagctggggcttccatttgattggaaagtcattactattctatgtagaagccactccactgaggtgtaaagcaagactcataaaggaggagccttggtgtcatggaagtcactccgcgcgcaggacctgtaacaacctctgaaacactcagtcctgctgcagtgacgtccttgaaggcatcagacagatgatttgcagactgccaagacttgtcctgagccgtgatttttagagtctggactcatgaaacaccgccgagcgcttactgtgcagcctctgatgctggttggctgaggctgcggggaggtggacactgtgggtgcatccagtgcagttgcttttgtgcagttgggtccagcagcacagcccgcactccagcctcagctgcaggccacagtggccatggaggccgccagagcgagctggggtggatgcttgttcacttggagcagccttcccaggacgtgcagctcccttcctgctttgtccttctgcttccttccctggagtagcaagcccacgagcaatcgtgaggggtgtgagggagctgcagaggcatcagagtggcctgcagcggcgtgaggccccttcccctccgacacccccctccagaggagccgctccactgttatttattcactttgcccacagacacccctgagtgagcacaccctgaaactgaccgtgtaaggtgtcagcctgcacccaggaccgtcaggtgcagcaccgggtcagtcctagggttgaggtaggactgacacagccactgtgtggctggtgctggggcaggggcaggagctgagggtcttagaagcaatcttcaggaacagacaacagtggtgacatgtaaagtccctgtggctactgatgacatgtgtaggatgaaggctggcctttctcccatgactttctagatcccgttccccgtctgctttccctgtgagttagaaaacacacaggctcctgtcctggtggtgccgtgtgcttgacatgggaaacttagatgcctgctcactggcgggcacctcggcatcgccaccactcagagtgagagcagtgctgtccagtgccgaggccgcctgactcccggcaggactcttcaggctctggcctgccccagcacaccccgctggatctcagacattccacacccacacctcattccctggacacttgggcaagcaggcccgcccttccacctctggggtcagcccctccattccgagttcacactgctctggagcaggccaggaccggaagcaaggcagctggtgaggagcaccctcctgggaacagtgtaggtgacagtcctgagagtcagcttgctagcgctgctggcaccagtcaccttgctcagaagtgtgtggctcttgaggctgaagagactgatgatggtgctcatgactcttctgtgaggggaacttgaccttcacattgggtggctttttttaaaataagcgaaggcagctggaactccagtctgcctcttgccagcacttcacattttgcctttcacccagagaagccagcacagagccactggggaaggcgatggccttgcctgcacaggctgaggagatggctcagccggcgtccaggctgtgtctggagcagggggtgcacagcagcctcacaggtgggggcctcagagcaggcgctgccctgtcccctgccccgctggaggcagcaaagctgctgcatgccttaagtcaatacttactcagcagggcgctctcgttctctctctctctctctctctctctctctctctctctctctctctctctaaatggccatagaataaaccattttacaaaaataaaagccaacaacaaagtgctctggaatagcacctttgcaggagcggggggtgtctcagggtcttctgtgacctcaccgaactgtccgactgcaccgtttccaacttgtgtctcactaatgggtctgcattagttgcaacaataaatgtttttaaagaac

SEQ ID NO: 247 - DNA, 562 bp, Rattus norvegicus (Norway rat)
agagactccccaagggatttcgtgtaccagttcgagggccagtgctactacaccaccgggacgcagcgcatgcggctcgtgaccagacacatctacaaccgggaggagtacgtgcgcttcgacagcgacctgggcgagtaccgcgcgctgaccgagctggggcggccctcagccgagtactggaataagcagtacctcgagcagacgcgggccgagctggacagggtctgcagatacaactacgaggggccgggggctctcacctccctgagacggcttgagcagcccaatgtggccatctccctgtccaggacagaggcccttaaccaccacaacctgctggtctgctcagtgacagatttctacccagcccagatcaaagtgcgctggttccggaatggccaggaggagacgacgggggtcgtgtccacacagcttattaggaatggggactggaccttccagatcctggtcatgctggagatcacgcctcagcggggagatgtgtacacctgccatgttgaccaccccagccttcagagccctgtcacagtggagtggc

SEQ ID NO: 248 - DNA, 1957 bp, Rattus norvegicus (Norway rat)
gggcatgagtggctcggctctgagcttcaccatattcccaggaagtatccttgggttcctccaaatagccactgtgctcactgtgctcctgctgctcctcaagacagcccagttctacctgcacaggcgatggttactcagagctacccagcagttcccatccccaccttctcactggttctttgggcataagatcccaaaggaccaggattttcaagatattctaacacgggtaaagaatttcccaagtgcctgtccacagtggctctgggggagcaatgtgcgaatccaagtgtatgaccctgaatacatgaagctgattctggggagatcagacccaaaagctcatggttcctacagatttctagctccctggattgggtatggtttgcttctgctgaatggacagacatggttccagcaccgacgaatgttgactccagctttccactatgacactctgaaaccttatgtgggcatcatggcagactctgttcgcataatgctggataaatgggaacagattgttggacaggattccaccctggagatcttccaacacatcaccttgatgaccttggacaccatcatgaagtgtgccttcagccaagagggcagtgtccagttggacagaaaatacaagtcctacatcaaggcagttgaggacctgaacaatctcttttttttccgtgtacagaacatgtttcatcagaatgacttcatctatagtctgtcctctaatggccgcaaggcccacaatgcctggcaacttgcccatgattacacagaccaagtgatcaaatcaaggaaggctcaacttcaggacgaggaagagttgcaaaaggttaagcagaaaagacgattggatttcctggacatccttctgtttgccagaatagaaaatggaagcagcttatctgataaggacctgcgtgctgaagtggataccttcatgttcgagggccatgacaccacagctagcggtatctcttggatcttctatgctttggccacaaatcctgaacaccagcagggatgcaggaaggagatccagagtctcctaggagatggagcttctatcacctgggacgacctggacaagatgccctacaccaccatgtgcatcaaggaagctctgaggatctacccacctgtaacagctgtgagcagaatgctcagcacacctgtcaccttcccggatggacgctctttacccaaaggtatcacagtcatgctctccttctatggccttcatcacaacccaactgtgtggccaaatccagaggtgtttgacccttatcgatttgcaccagagtcttcccgacacagccactcattcctgcccttctcaggaggagcaaggaactgcattgggaaacagtttgccatgaatgaactgaaggtggccgtggccctgaccctgctccgctttgagctgctgccagatcccaccaggatcccaatccccataccaagactcgtgttgaagtccaagaatgggatctacctgcgtctcaaaaagctccaataatcttgacagcacaagacagctccaacagcatgctgtctgccatttgtctttctgtcagtcactcttgtccccactccatctgctcacatctcattctttcttctcaccttgttcacctccacccaccttctgctgtgcttctggtctccttgtctgtcagtctttctatctcgacttctggaatttctacctgcttttctctctacctggcccctacctgacttcatgtttgaccttgaccttaatgatctccctaaattacaccctgccttctcttctgcatatttccttctattctactgtttgtctgtgcttaaattgagctttataccaatgtcataattgattacaatagaagtattgccctatgattcgatataccaggtgtttttcatgatttcattagaataaagctcaggtcattgc

SEQ ID NO: 249 - DNA, 3641 bp, Rattus norvegicus (Norway rat)
ggatccaatttgatatggttatatccaattataatttgtataagcaccacatatgtattaggtgtttgttgactccactgcaacacaaattgtactagctgtccctgctgctgctgcactcaaacttgttcctaagttagggccttgtgtgcacctaccattgagccacattcctcactccagttagcaaaatttccaaactattatatgccaggcaatggcttaggtaccaagaataaacaatccgtgttctgtctgggtaaggggcaaattaacaataaacgcccaagtactaggcaactgataatacctaacagtgtaacctagggtcacaagagtaagtctcttagtggcactttacaccagagggctgaggaaagcccaacagattgaattgacaaagagaagtcatgtcatttcacactcagagctcatcttctctcctcccgaatgcctttagcttgctctgcttggaaatatccaggtcttcctcacaccatccttcctatccctctacccaagagtctcccttggctccatactatacagttgaaggtgtgaccggtctcactttaaagacaatgcccccacacaacactggtccgcatcacctgccctgactagagagcacttgtgtgtagctgtggctgccctccaccatgttgggaaggccttaggaagtaagcatcacgcagtgactatttctacttatctccaaaggcccgtgttcagatagaaaacccggggtctcaacacatcccacttgagttaaaatctcccgaggatggcaaaggagggggcaggggtatctccgagttcgaaggcagcctggtctagaatgagtcccggggcagccagggctacaaagagaaaacctatctcaaaaactccaatcaaggggttggggatttagctcagcggtagagcgcttgcctagcaagcgcaaggccctgggttcgatccccagctccgaaaaaagaaccaaaaaacaaaaaactccaatcaaatcttctagattgggccgggcgtgacgacgcggtcgaggctagcctggtctacacagtgtgctctaccacggccagagcaaatagtgaggccctatctcaacccccaccagcacctccacaggtaatttttaatcgatattgtcagctgatgagggcacccgtttgctacgcttggaaccagttagtggcaatccgtttaaagcaatccaagacaactctctcgtcctctgccacggagggaactcgtgagcggtcccaggcaggccgagtacttctcccaccacacaccaggaagtcacctctctgaacctggagttatacctaccgcgtgaggtcagagattaaatggactgtttgtgcactgctcacacacacacacacgcgcgcgcgcgcgcgaaattgcttttattaggagctctcaggaaagtggtggctcgcatcaggctaccacagccaagaggaccgccacctctaccgagggcaggccaaggcccactaaacggcccgaatgaactctaggccttccggcgctctccagctcttcagcgcggcgaacgttctaggcccctgagaagtccaccgggaggcgcaggtttccgctacgcgagggggaaatccccgagaaatgcccagaccacctaagcacagacgtccatgcggcgtacggatacctgagggaatccgggccataccgccacctactcgcgcctcactcaagccgcgccaaactcgcgcgtttcactgcgcaggcgtgtacgcagcgggcgctcaggaacactcaaaggaccagcacactgaccaatcaacgtccgccttggccaaaactagtcccgccctcaaaagcagacgtcaggccccgcccctaagagccccgccctcccccacgctttaggcccgacccacgccgtcctgggttaaggctcgcggttggttcgggggacggacgcgagctctggttggtggaggtgaggtcacgagaacaccttcgtcgcctttccagaggcgattactgggcaagctcagtcttttgcctcagacgctagctgtagctggcaggcggttgtacgtgctccagagtcttcattacccgccgatccagtcgtcttcgcgtgggttccgctaagctcttctgagctgctcgctctctacacacgccgtcgccgtaatccgccatcatggtgaaactcgcaaaggtaataggcctgacgcgcgaacacggacgactaggcctgctttctgagagacgcgcgcgcgcccgtcgcggaggggaggagggcctgcgcacagtcccgggcgcgttcgagggcgcatgctgagggaagtctcgcgcgactagcggaagggtctcgcggtgtttggcctctgacttgagggatgagaggagccgaggcaggttctgggagggcgatgtagagtgcaccggggccgggggtcggtgtgaggggaagtcggaggagttgagcgcggagagggggttggaggctcggcgagtgaagtgggccaaccttaagcggctaccgctctcgggggcccccgcctcccggcgcacgtgctccggtgcgcggcccgccacgtggttacggcgctccgcacgtgtcgcgcgtccgaggcagtgaggggagtgggagtacacgggaaagggggacagtagagttgggccatgttacctagcgatcgcatgtccctgaccgtgacggtagatggacacgtggtgggctcctgaggtagcgcgtggtgacccggcctaggtgactccacgtggtttggctgtaagcgtgagaaagtaggaagtagctccgatacagagatgcttttaagaggtgccttcgagataacccccttccccggcaaatagttaaaatggaacctttaactgggtttttttcttttttgtggaaggtgccagaaaataaagtgccacgactaagtagactttaaaaacctgtggctgtttcctggtgaaggtttctgtctgtaagacaaattatgcgcagttctcagaaaaatttgccaggaagagtgtgctgcctggccacgagaagtctttatgcttgtgttctttagtaagaaaggaggtggtggccgaggacaaagtggcttacaatgcgggtgatttttttgtgtgcatttgtaggccggcaaaacccacggagagtccaagaaaatggctcctcctccaaaggaggtggaagaagatagtgaggatgaagaaatgtcagaagatgaagatgacagcagtggagaagaggaggtaggatgctatttgaaaaattgtgtgatttgcagtggtagattgactggaagtgtcagaaataacagtcagttcggggggtgtctgggcagagttttgtatgttgtattgagtagagtttactgtagatttgtggggtggttttccctccgtttttgggaaaattgcttattctagcctaatttttattcagtccatggtcacttggctttgtgaattttggcaggacattatgacaggaagctgtagaccagcctaacctcagataggttctcctgaattaggtgttagccacagtatccacgacaaatgacaagtttagtgagaaacccagactttgatctaggtagagatggaatcagggtctcagcttaggtggtacc

SEQ ID NO: 250 - DNA, 1712 bp, Rattus norvegicus (Norway rat)
atggcgacggcagtgtgggcggctgcgcggctacttcggggttctgcggcgctgtgcgcgcggcccaagttcggttctcctgcacacagacggttcagcagtggcgccacctaccccaacatccctctctcttctcccttgcccggagtgcccaagcctatttttgctacagttgatggacaggaaaagtttgaaaccaaagtcaccactctggacaatgggcttcgtgtggcatctcaaaataagtttggacagttctgtaccttaggaattcttattaattcaggatcacgatatgaagcgaaatatcttagtggaattgctcattttctggaaaaattggcattttcgtctaccgctcgatttgacagcaaagatgaaattctgcttaccctggaaaaacatggtggtatctgtgactgccagacctcgagagacaccaccatgtatgctgtgtctgctgacagcaaaggcttggacactgtggtgggcctgctggctgatgtggttctgcacccccgcctgacagatgaggaaattgagatgacgaggatggctgttcagtttgaacttgaggacctgaacatgagacctgacccagagccactgctcaccgagatgattcatgaagctgcttttagggagaacacggtgggcctgcaccggttttgtcctgtggagaatatcgggaagattgaccgagaagtgctgcattcctacctgaagaactactacacccccgaccgcatggtgcttgctggagtgggcgtggagcatgagcacctggtcgaatgtgccagaaagtacctcctgggagtgcagcctgcctggggagctccgggagctgtgtggatgttgacagctcagtggcacagtacacgggggggatcatcaaggtggagagagacatgtcaaatgtcagccttgcgcccaccccgattccagagctcacacatatatggtggggctagagagctgctccttctggaggaggatttcatcccctttgctgtgttgaatatgatgatgggaggcgggggctccttctcggccggagggcctggcaaaggcatgttctccaggctctacctcaacgtgctcaatcggcaccactggatgtataatgcaacctcctaccaccacagctatgaagacacaggcctcctgtgcatccatgccagcgcagaccctcgacaggttcgagaaatggtagaaatcatcacaaaggagtttattttgatgggccgaacggtggatttggtggagctggagcgggccaagacacagctgatgtccatgctcatgatgaacttggagtccaggcctgtgatctttgaggatgtggggaggcaggtgttggctacacattcaagaaagctgccccatgagctgtgcacactcattcgcaatgtgaagccggaagatatcaagagggttgcttccaagatgctccgaggcaagcctgctgtggcggctctgggtgatttgactgacctgcccacgtatgaacacatccaggcagcgctgtccagcagagatgggcgcctgcccagaacataccggctgttccggtagagccctccagcggaggctgcagagtgcttctgtgcatgttactgttggtgtggacactgcataagaatagctagctctgtgaacagtgccaacagggaagctctggaaacttgaatgaaagttactgttgccactgc

SEQ ID NO: 251 - DNA, 1715 bp, Rattus norvegicus (Norway rat)
gaaaaagaaaaaccaacaagaaagccaatggctctcttcatttttctggggatttggctttcttgtttggtttttctttttctatggaatcagcaccatgtcagaaggaagctcccacctggtcccactcctctaccaatttttggcaatattttgcaagtgggtgttaaaaatatgagcaaatctatgtgcatgctagcaaaagagtacgggcctgtgttcaccatgtatctgggcatgaagcccactgtggtgctgtatggatatgaagtattgaaagaagctctgattgaccggggagaagagttttctgataaaatgcattcgtcaatgctcagtaaagtcagccaagggttaggcattgtcttcagcaatggagaaatatggaaacaaacacggcgtttctccctcatggtcttaaggtctatggggatgggaaagagaactattgaaaaccgaattcaggaggaagttgtttatctgctggaagcactgagaaaaaccaatgggtccccgtgtgaccccagcttccttctggcctgtgttccctgcaatctgatctccagtgtcattttccagcaccgttttgactacagtgatgagaaattccaaaaattcatagagaatttccatacaaaaattgaaattttagcatctccttgggcccagttgtgcagtgcctatcctgttctatactatctcccgggaatccataacaaattcttaaaagatgtgactgaacagaaaaagttcatcttgatggaaataaacaggcatcgagcatctctgaacctcagtaaccctcaggactttattgactatttcctgattaaaatggaaaaggaaaaacacaatgaaaagtctgaatttaccatggacaacctgatagtcaccataggtgatctttttggagcaggaacagagacaacgagttccaccataaaatatgggcttttgctcttgctgaagtacccagaggtcacagctaaaattcaggaagaaattactcgcgtgattggtagacaccggagaccctgcatgcaggacaggaaccacatgccctatacggatgctgtgctgcatgagatccagagatacattgattttgttcccattcccttgcctcgtaagacaacgcaggatgtggagttcagaggataccacattcccaagggcacaagcgtaatggcatgtctgacttctgccctgcacgatgacaaagaatttcccaacccagagaagttcgaccctggccactttctcgatgagaaaggcaacttcaagaagagtgactacttcatggctttctcagcaggaagaagagcctgtattggagaaggtttagcccgcatggagatgttcttaatcctgaccagcattttacagcattttattttaaaacctcttgtcaatccagaggacatcgacacaaccccagttcaacctggtttattgtctctgcccccaccctttcagctctgtttcattccagtctgaagcggcatagtctttcacacagatgactgagaccctgcttctacttgtgagcaaacaggtcctcctgtcctcgtgtacctgtaactggcagtccttcctgaatggcagggatgctacctctgaactgtcctacatttttttcaattctttgtgaaccagttccaatttttcatatgtgaaaaaacttcactgttttagcactaataaagttttttttc

SEQ ID NO: 252 - DNA, 735 bp, Rattus norvegicus (Norway rat)
agatctccctatctaaggagtccagcaatggggtcaacgccaatgggaagtaaatgctaaaatatattcttattcaataacttcttactggacttgagtactcttagagcttccctgagtctgttttgttattgaatggttagtaaatgtatttctgtattagagctaaaaataaaatgtcaacttcgagttgtcaatcagtagcctgctaggattcctttccttaaaagtaatcagacccaccagagctcccagggactaaactgccaaccaaagagtacacatggagggacccacagctccagcgtagcaaaggatggccttgtctggcatcagtgggaggggaggccctgggtcctgtggagccttgatgccccagcataaggggaatgctagagcagtgaggtaggaatgggtgggtaggtcggggagcaccctcttagaggcaaaggggaaagggatgggatgggaggcttgcagaggggagaccaggaagggggacaacatttgaaatgcaaataaataaaatatccaataaaaaaatgttaaggcatgaggagatggctcagtggttaagagcactgactgttcttacagaaggtcctgagttcaatccccagcaactacatggtagcttacagccatctgtaatgggatctgatgccctcttctggtgtgtctgaagacagctgcagtgtactcacagacaattaataaataaaatctttaaaaaat

SEQ ID NO: 253 - DNA, 4190 bp, Rattus norvegicus (Norway rat)
ttcaagatcctgtacaatgggcagagcgtggaggtggatgggcactccatgcggaagctgattgcagacctgcaacccaacacggagtactccttcgtcctgatgaaccgcggcagcagcgctgggggcctacagcacctggtgtccatccgcactgccccagacctcctgcctcagaagccactgcctgcctctgcctttatagaggatggccgcttctccctctccatgcctcaagtgcaggacccctcgctagtcaggtggttctacattgtggtggtgcccattgaccgtgtgggcgggaacctgctggcaccaagatggagcacaccagaggagctggagctggacgagcttctggaggccatcgagcagggtgaggagaaacagcggaggcgtcggcgccaagcagagcggctgaagccttacgtggcagctcaagtggacgagctccctgagaccttcaccctgggggacaagaagaactaccgtggcttctacaaccggcccctgtctccggatctgagttaccagtgctttgtgctcgcctccctcaaggaacccatggaccagaagcgctatgcctccagcccctactcggacgagatcgtagtccaggtgacaccagcccagcagcaggaggagcccgagatgctgtgggtgacaggccctgtcctggcagtcattctcatcatactcattgtcatcgctatcctcctattcaagaggaagagaacacattccccatcgtcaaaggatgagcagtcaatcgggctgaaggactccctgttggcccactcttctgaccctgtggaaatgcgaaggcttaactaccagaccccaggtatgcgagaccacccgcccatccccatcactgacctggcagacaatattgaacgtctcaaagccaatgatgggctcaagttctcccaggagtatgagtccattgaccctggacagcagttcacgtgggagaattccaactcagaggtgaacaagcccaagaaccgctatgcaaacgtcattgcctatgaccactctcgagtcctcctcacctccattgatggtgttcctgggagtgactacatcaatgccaactacattgatggctaccgaaagcagaatgcctacatcgccacacagggtccgctgcctgagaccatgggtgatttctggaggatggtgtgggaacagcgtacagccacagtggtcatgatgaccaggctagaggagaaatcccgggtgaagtgtgatcagtattggccagcccgtggcactgagacctatggcctcattcaggtgaccctggtggacactgtggagttggccacgtacaccatgcgcaccttcgcactccataagagcggctccagtgagaagcgtgagctgcgtcagttccagttcatggcctggccagaccatggggttcctgagtaccccactcccatcttggccttcctgagacgggtcaaggcctgtaacccgctagatgcaggacccatggtggtgcattgcagtgctggtgtgggccgcacgggctgcttcattgtcatcgacgcaatgctggagcgtatgaagcacgagaagacagttgacatctatggccacgtgacgtgcatgcgctcgcaaaggaactacatggtgcagacagaggaccagtatgtgttcatccacgaggcactgttagaggctgccatgtgcggacacactgaggtgcttgctcgaaacctctatgcccacatccagaagctaggccaagtgcctcccggggagagtgtcactgccatggagcttgagttcaagttgctggccaactccaaggcccacacgtctcgcttcattagtgccaacctgccctgcaacaagttcaagaaccgcctggtgaacatcatgccctatgagctgactcgagtgtgcctgcaacccatccgtggtgtggagggctctgactacatcaatgccagctttctagatggctacagacagcagaaggcctacatagctacacaggggcctctggccgagagcaccgaggacttctggcgcatgttatgggagcacaattccaccatcatcgtcatgctgacgaagcttcgggagatgggcagggagaaatgtcaccagtactggccagcagagcgctctgctcgctatcaatactttgtcgttgacccgatggctgagtacaacatgccccagtatatcctgcgtgaattcaaagtcacagatgcccgggatgggcagtcaaggacaatccgacagttccagtttacagactggccagagcaaggagtacccaagacgggggaaggcttcatcgacttcatcgggcaggtgcacaagacaaaggagcagtttggacaggatgggcccatcacagtacactgcagtgctggtgtgggccgcacaggggtgtttatcaccctgagcattgtcctggagcgcatgcggtacgagggcgtggttgacatgttccagaccgtgaagaccctccgcacacagcgccctgcaatggtgcagacagaggaccaataccagctgtgctaccgtgcggccctggaatacctcggcagctttgatcactatgcaacgtaactactgctcccctctcctccgccgctcccctgaggggctccggaggggacccagctcctctgagccataccgaccatcgtccagccctcctgcacggatgctgttgccggcagagcacagcccactgggatcacagcatttcgggaacattgccacaccagtcagagagcccagaacacctgggcaagtaggcggactggcagcctggctctgggccctcgtccaccgggcccaagtggagccctgcttcaagctctctgttcagctccgcgattctcatgcttctcatggggtgggaaagggggcagagccccccacgttttatacatttaggcggggtagactgcggggtcctagcctcttcctccgactttccttttgcaggtctttcactacagattgggctgctgtgggagttgggacttacttgttttcctttttgagttcacgttggatccttgtacaacttctgcggaaggacacagtacacgctttccttcctcgagcagagctagggccctacctgagcaagtcggctgtggcccgggaggcagctgagactcctgctgtcctccagcctttcagaggagatcctattccagccaaatgcagggaaacactttattttgttttaggttttgtttttccttgagagcctttttttaggccccacagacagtggtgggcggggaggcgataggaaacacatccccagtgtgcatttaacattcatagcctacaaccacagacgtgtctggggggagcctggcaaggcgttcctcgtcaccatcgtgtttgcaaaggttcaaaaaagcaaaaattaaaaaaaaaaaaacataaaaatatttttttttaaaaaaaagaaataaagattcatcccctggcctctccttctgctccgaagtgggaggcaactcaatgtgcctggggctcgttgtgggcccacagagtcttgctgtcatccccagcggtgcagtgtggcaggtgtttgtaagctgtgggttctggccacctcggtaactgaatggcacaggtgagggcctgtgccacgccccacacacctcagggccaagcgggggcgtggccggcccttcaggtctagccagtgggcctggtagcacatgtctgtcctcagcgggacagatgctttctctcctggtttgcagctgtcttcaaatcccccatgactcgcccttcccactccttcaagtcgccctcacaaaccaatgtggcaagactactggacttgtatccatggtactctactcagtcctcttatctcagcttgctgaggggcagggagagggtctcttcctctgggcagcactatctaggtagtaagtgggggcgggaaagggtgcatagctgttttagccgaaggactcgatgtggacgtcctcagatatagctaggctaagcggagatcgacggtccggggttggtggtgttggatgagacattcatttttaccttgtggacgctagtgctgtagagttcactgttgtacacagtctgttttctatttgttaaggaaaactacagcatcattgcatacttcttgatggtaataaatttgaataatcagatttcttaca

SEQ ID NO: 254 - DNA, 1688 bp, Rattus norvegicus (Norway rat)
cagaaggagtcatggctgccaaagtgtttgagtccatcggaaagttcggcctggccttagcagttgcaggaggcgtggtgaactctgctctatataacgtggatgccggacacagagctgtcatcttcgaccgattccgtggcgtgcaggacatcgtggtaggggaagggactcacttcctcatcccctgggtacagaagccaatcatctttgactgccgctctcgaccacgtaatgtgccggtcatcaccggcagcaaagacttgcagaatgtcaacatcacactacgtatcctcttccggccggtggccagccagcttcctcgtatctacaccagcattggcgaggactatgatgagcgggtgctgccatctatcaccacagagatcctcaagtcggtggtggctcgattcgatgctggagaattgattacccagcgagagctggtctccaggcaggtgagtgatgacctcacagagcgagcagcaacattcgggctcatcctggatgacgtgtccctgacacatctgaccttcgggaaggagttcacagaggcggtggaagccaaacaggtggctcagcaggaagcagagagagccagatttgtggtggaaaaggctgagcagcagaagaaggcggccatcatctctgctgagggtgactccaaagcggctgagctgatcgccaactcactggccaccgccggggatggcctgatcgagctgcgaaagctggaagctgctgaggacattgcttatcagctctcccgctctcggaacatcacctacctgccagcagggcagtccgtgctcctccagctcccccagtaaggccagccagccagggcctccatcgctctgaatgacgccttccttctgccccaccccagaaatcactgtgaaatttaatgattggcttaacatgaaggaaataaaggtaaaatcacttcatatctctaattatcaaatgaagcttttattgttacactttttgcccactttcataacaaaattgccaagtgcctatgcagactggccttccaccctgggtgctggcagtcggcggaagaaaggcagggcagtgtgtgtggtggacggggagccagctggcagcctgagtagaccttgagcctccattctgccatatattgaagatttacagacagtggtgcacacacgtgaaccaaaagcaagccctcaatttttccagccatacgaacccggacagatgcagctgaggagggcctgaggaagtggtctgtcttaactgtaaggccattccctcttaaccgtgaccagcggaagcaggtgtgtgcgtgcgactagggcatggagtgaagaatctgcccatcacggtgggtgggcctaattttgctgcccccaccagagacctaaactttggatagacttggatagaataagaggcctggactgagatgtgagtcctgtggaagacttcctgtccaccccccacattggtcctctcaaataccaatgggattccagcttgaaggattgcatctgccggggctgagcacacctgccaaggacacgtgcgcctgccttcccgctccctctcttcgagattgcccttccttcccaagggctgtgggccagagctccgaaggaagcaatcaaggaaagaaaacacaatgtaagctgctgtcaataaatgacacccagaccctc

SEQ ID NO: 255 - DNA, 1893 bp, Rattus norvegicus (Norway rat)
tgtctcactcagcgagacgcgcggtgcacggtgcttccccggcggacgaccgaccaacccgcgctccggcagagtccttggcgctcgcctgccggcgggacagacagcccgcctctagccgctctctggaccctggccgccccgagcgaagactggagcaaaatgatgcttcaacatccaggccaggtctctgcctcagaagtcagcgcgaccgccatcgtcccctgcctctcacctcctgggtcactggtgtttgaggattttgctaacctgacaccttttgtcaaggaagagctgagattcgccatccagaacaagcacctttgccatcggatgtcctctgcgctggagtcagtcaccatcaacaacagacctctggagatgtcagtcaccaagtctgaggtggcccctgaagaagatgagagaaaaaggaggcggcgggaaagaaacaaaattgctgctgccaagtgtcgaaacaagaaaaaagagaagacagagtgcctgcagaaggagtcagagaaactggagagtgtgaatgccgaactgaaggcccagatcgaggagctgaagaatgagaagcagcatctgatttacatgctcaacctgcaccggcccacgtgtatcgtccgggctcagaacgggcggacgccggaagacgagaggaacctttttatccaacagataaaagaaggaacattgcagagctaagcagaggtggcatgggggcaattggggagtccttactgaatcctccttttccaccccaaaccctgaagccattggaaaactggcttcctgtgcacttctagaatctcagcagccacgagctgttgggtcaggagggcctgcggtgactactgcgttgtcccactctgtccccgagtgaaccgtggagcaggcaggagcatcctttgtctcaccggctccaggatttaggccttaccatcccggccattctcagatgacctagctggccccaggctggggtcccatgcaaagcaggatcgcactaatgggatgcaggcagaagtgtctaccttgacaggtggggtggaccacgtcctccactgcggctgacaacatccctcctagggaagatggagtgagaacattcatcattgaagttgtccaatggccagggtatgctttctagaaactatgctgttctgtcctagactgactgtgcatagggcattcatttctgagcctggtgttgtgctatttagatgtttgtcttgcacaacattggcgtgatttttttccgggagtttcatcagacctgatttccgagagtttgggggtctgccactgtggacaatatcccccaaaagtgtttgggtggccatgtaaactggctgatgaccagctgtgctactctgtgctgaccgaggactgatgcctccttcccctgtacccactgctgaggaagaacccgggcacagcagctgtccttggctacaaactgttacaatgtcacagaacgaaggcacaaagtcccgctttcaaagggcgtaggactccacactcagtgacagggcaggaagagccaaggattctccgttttcccttccttcccaccaaaaaccacagcccgtggagactggtatttgaagccaggagtggggcaaggaaggtgtctgcactgtgggatgttaactgcgcttttgtcttgaagctattttgagatgcggtccagagtatttcagctgggaggtccctcccactggccaccagggctctggctactgttaaaattctgatgtttctgtgaaatcctcagtgttcaatccagactcagtagtatattacagttttctgtaagagagaacgttacttatttatcccagtattcctagcctgtcaacgtaataaaatatcagaatgagacctggt

SEQ ID NO: 256 - DNA, 4795 bp, Rattus norvegicus (Norway rat)
ctgcagcacagccctgcccttctcttgccctggagccacaaccctctttacagctcctagggatctgattcgctttgacctcccactgggtagcccgatcttgggctggttataaagtccatgagcctgactcagacctgtccggaatctccaatgggggccatggcgccgcccttgctgctcccgctgctggtggctgccctggccccgactcagacccaagccggtgagtgcggggtcctgagggaaatggcctctggggtaggggcgggggcggcaccggggaagaccggtccccgcgtcgaacaccagaccctccgccccttctccacccgcgacccgagccccgcgccctgctcccggcccggcccgcgcacccgcccggggtcccggtaggaggtccgggtctcaccgcgagccgcccccaggctcacactcgctgcggtatttcaccaccgcggtgtcccggcccggtctgggggagccccggtaacggaagtgggctatgtggacgacacggagttcgtgcgcttcgacagcgacgcggagtatccgaggatggagccgcgggtccggtggatggagcgggagggcccggagtattgggagcgggagatgcagagagccaagggcaaccagcagtggttccgagtggacctgaggaccctgctccgctactacaaccagagcgagggcggtgagtgaccctgggacggaggtcaggatccctccgcgtccccacacagcaggaaacgtcccgggtcccaagtccgagtttcaggagctgaacccacccgagcccgccctttcagtttggaggagtccccgggtgggcggggcgggggcggggcgggggcgggggcggggcgggtgggcggggactgaccgctggtcccgcaggctcgcacaccttccaggtgatgtctggctgtgacgtggggtcggaagggagcctcctccgcaggtatgagcagttcgcctatgatggccaagattacatcgccctgaacgaagacctgaaaacctggacagcggcggacacagcggcacggatcacccggagcaagtgggatcaggctggtgatgcagattattacaaggcctacctggagggcacgtgcgtggagtggctccgcagatacctggagcacgggaaggaggcgctgctgcgtctaggtgcggagatgcgggcttctcctccctctgccctcgggctgggtctcactcctgggaaagaagaaaccctcagctgggtgatgcccctgtctcagaggggagagaatgtccctgggtctcctgatccctcacgacagtgactgcactgcctctcccagggcccagccttctccctggagagttctgagtccctctcaggtgggaaggagagaacttccccactgaacagcaagggctccctgctgtcagccatggcctctcccaggccaggttctctgcccacacccactcactgaggacactgactcctgtcctgctgagtgtgtcagcccttcacacctcaggaccagaagtctcctttatctcagaggagacatggactccactacactaggctggttctcccagtctatagaactttccaaagaatacattctcacagatccctccctgatgtggggtttgcctctcttccacaccccatttctctctattcctacagtggagaatggtcccatgagcccttatggggtaccctggaggatataaactgtgggatttctttttctttttttctctcttttttcttattttctttttctttttatttttttcctttttttttttttttggaaggcattatttttcttctagtcaggttttctctgcaaacacatatttaataaattattttccattccctcttctgttctatgaccacccatctcatgctatagaacatcacataaggatggccatgttgacccactggctcatgtggattccctcttagattctgagtccctcaggaaagtgtgcagttctgtgctgagggcaccagctctctagtcgatgacagttgaagtgtcagacacacacagttcagtgtcatcattgatttaactgtgtcttgtgtagatttcagtttgtcttgttaactgtgtgatttcttaaatcttccacacagatcccccaaaggcacatgtgacccttcaccccagacctgaaggtgatgtcaccctgaggtgctgggccctgggcttctaccctgctgacatcaccctgacctggcagttgaatggggaggacctgacccaggacatggaacttgtggagaccaggcctgcaggggatggaaccttccagaagtgggcatctgtggtggtgcctcttgcgaaggagcagaattacacatgccgtgtggagcatgaggggctgcctaagccgctttcccagagatggggtaaggagggagccttctatagaccctgagctggtcagggctgagagctggggtcatgacccccaccttcatttcctgttcctgtccttcccagagtctcctccatccactgactccaacgtggaaaccattgttgtttctgttgttcttggagctggggccatcattggagctctggtggctgttgtgaggaagagatggataaaaacaggtaggaaagggcagggtctgtttcccctcagcttcctttagaagagcgctctgctcattaataggaaacatggccacaccctccatgctactgtctccaactgggtcctctgtcagttctggaaacttcctcctgtcaaaacattcagtgaaatcttacatatttccttctcacaggtggaaaaggaggagtctacacccctgctctaggttagtgtgggggcaggagtgtccctgagggtattggagtgaagctggagatgttgggagctctgggaatccatagtagctcctccagagaaatcttctgggggtgtcagttgtaccgtgatatgaatacatacatacacatatacacatacatatcttttgttttaccctagtataccctgtgcagtgacagctcccatcatctcttatgtgtctttctcagattgtaaaggtaactctgggtctgactggggaggggcaatgtggacatgattgggtttcagggactcccagaatcccctgtgagtggagggttgttgggctgttgtcttctcagtgatggtttatgactctcgttctctagcatgaagacagctgcctggagtggactgagtgacagacgatgtgttcaggtctctcctgtgacatccagagtcctcagttctctttagacaccagtgtctgatgttccctgtgatctatggcttctgtgtgaagaactgtggagcccagcctgccctgcacacctggacactgtccctgcactgcctgtgttcccttccacagccaaacttcctggtccagcctgggggagagagagagagagagagagagagagagagagagagagagagagagagagagagagagagagagagagagagagagagagagagagagagagcagcagagagagagagagagagagtgtgtgtgtgtgtgtgtgtgtgtgtgtgtgtgtgtgtgtgtgtgtgatatctgtatcttgggagctccatggagccctgagctgcagctcctcacttccacactgagaataatgaatctgagtgtgaacttgattgttcacatacttgacccaatgtagatattttttttaattattggattgaatacttagaggttttttgttctggggtcttgttttgttttgttgataaaaataattggcagatggagaagtttccagaatctgtgtcacaagctgtgtgtatctggtgggacagtgtgaggctgtgggagctgagtgtggacaggctgtgcccaggtgtgctcagtcagttcttgtcattgatggactcaggtctcagctctgtctcctccaggctgtgccctctccatcactgtgaagacatggggagagtctgtgatcacaaggacacagggaaggccagagccttgtccttgtcctgtccccaggattatgagcccccagggctgaagatcagagactcaagtggggtcctctaaagtgcagggtgcacaagatgagtcactacatctcctcccactcacttgatttagctgctaatgatggggtcgggaatctgccctgggctctccctgtggccatgctgctgtggtgatttctgcttctcctttctggtgtctttcccagggttctcagggtctggtgtgatctgtctgctcatctctcaggaccacctccacagctgagataagacctaacagagaggcttctcccctgtaacttgggtaccgattcctgaaccaggactgtcttaccttttccgtcttgtgttctggagttaactccctgaagtctcttaatctccacccccagctctgtgcacctgggtcttgcagctgatgcacctgtggttgctctgcctttggatggctctgtatggcaggagagcaaagtccccctcagaggcctgggaccatttaaatcatctcatattcatagcactaaagacacggaggcagaagctgagggaaaaacctgacagctcagcaaggaaactttattttcttaactacatacgggatatctatttaccagcctgatgctacaactaaactccagcccttcagatatctgtctgtgtcactctatcagtccagtctgcctttctcttgagctcctgcaaacccaagagggctcctgagctctctttcccggatttatattttatctgtgtcctgccagct

SEQ ID NO: 257 - DNA, 2748 bp, Rattus norvegicus (Norway rat)
ccggaagcccgaagcaccggagtcccgcagaacctgactccggcctgtcaccaccaccaaaggctaggggacgtcgcctcggtcactatggggctcctgctcaagcctggagcgcgccagggcagcggcacctcctcggtcccagacagacgttgtccccgctccgtcttcagcaacattaaggtatttgttctttgccatggcctgctacagctctgccagctgctctacagcgcctacttcaagagcagtctcaccacaatcgagaagcgctttgggctctccagctcttcctctggtctcatctccagtttgaatgagatcagcaacgctaccctcatcatcttcattagctacttcggcagccgggtcaaccgcccacggatgattggcatagggggtctcctcctggctgcaggggcctttgtcctcaccctcccacacttcctgtcagagccctatcaatacacctcgaccacggatggaaacaggagcagctttcagactgacctctgtcagaagcatttcggagccctgccccccagtaagtgccatagcaccgtgccagatacccacaaggagaccagcagcctgtggggcctgatggtggttgctcaactactggccggcattgggacagtgcccatccagccctttgggatctcctacgtggatgactttgccgagcctaccaactcacctctgtatatctccatcctattcgccatcgctgtgttcggaccggctttcgggtacctgctgggctcagtcatgctgagaatcttcgtggactacggcagagtggacactgctaccgtaaacctgagcccaggtgaccctcggtggattggagcctggtggctgggcctgctcatctcctcaggcttcttgattgtcacctctttgcccttctttttctttccccgagcaatgtccagaggagcagagaggtctgttaccgcagaggaaacaatgcagacggaggaggacaagtcaagaggctccctgatggatttcattaaacggttcccccgcatcttcctgaggctgctgatgaacccgctcttcatgctggtggtcctgagccagtgtaccttctcctcagtcatcgctggcctctccacgttcctcaacaagttcctggagaagcagtatggagccacggcagcctatgccaacttcctcatcggtgctgtaaatcttccggctgcagccttggggatgctgtttggaggaatcctcatgaagcgttttgttttccctctgcaaactatcccccgagtggctgccaccatcatcaccatctccatgatcctctgtgtacctctcttctttatgggatgctccacatcagccgtggctgaggtctaccctcccagcacatcaagttctatacatccgcagcagcctcctgcctgccgcagggactgctcgtgcccagattccttcttccacccagtctgtggagacaatggagtcgagtacgtttccccttgccacgccggctgcagcagcaccaacacaagctcagaagcttctaaggaaccgatctacttgaactgcagctgtgtgagtggaggatcggcgtcacaagacaggctcatgccccacgtcctgcgcgcactactgctcccgtccatcttcctcatttcctttgcggcgctcattgcctgcatctcccacaacccgctctacatgatggtccttcgcgtggtgaaccaggatgaaaagtcgtttgccattggggtacagttcttgttgatgcgcttgctggcctggctgccggctccatccctttatggcctcctcatcgactcctcctgtgtccggtggaactacctatgctcagggagacgaggggcctgtgcgtattatgacaacgatgctctccgaaacaggtacctgggcctacagatggtctacaaggccttgggcacactgctgctcttcttcatcagctggaggatgaagaagaacagggaatacagcctgcaggagaacacctcaggcctcatctgaccctcagctgggactactgccccaccccagagactggatcctatcccttccacacctacctgtattaactaatgtcaacatgccttcctcctcctcttcctcctcctcctcctccttcttcttcctctctctctctctctctctctctctctctctctctcacacacacacacacacacacacatgagagagagttcactcaccctttgagatcacctgccttttctcttctgcctaaagtcttaaggcctgaagtacactgagctgaatgagcaccgggcctgagagtttagtttctccaagtccttggaaggtatccccagcgtaggccctacgtcctccagacaagatgcccataatgaggcggcctctgttttcaccagtgtctcaggaatacttaatggagtgaaaagagggagtcttgccttcttgggccaggcagcccggatctcctctgcctctgcccacacccaggagagccagaggagaagcaggtagttggtttcttatctgctccagcggggctaagggagctgggtgtgtccacttttcatctggattccgtctagcatgaaagccgtgccctcgaggctgttttggaaaccaccattttgggaagtatccctctctataaactatgccccggtatctgaggaggaatgaagggaggaacaaggctggatcatggaaaactgttcacaggaaccagaggcctatcctcccgtcggg

SEQ ID NO: 258 - DNA, 2063 bp, Rattus norvegicus (Norway rat)
agcggacgctgtctgaggagtagagcctgcctgagagcgagtgtcccgtcggtcccggagcagcccagcccggcccagccctcacaggtcctctgtggtgcacacagcccacctcccagccatgcgctctctccttctgggcaccttatgcctcctggctgtggccctggcagccgaggtgaagaaacctgtagaggccgcagcccctggtactgcggagaagctgagttccaaggcgaccacactggcagagcgcagcacaggcctggccttcagcctgtatcaggcaatggccaaagatcaggcggtggagaatatcctcctgtcacccttggtggtggcctcatccctgggccttgtgtcactgggtggtaaagccaccacagcttcgcaggcgaaggcagtgttgagcgctgagaagctgcgggatgaggaggtgcacacggggctgggcgagctcgtgcgctccctcagtaactccactgcgcgcaatgtgacctggaaactgggcagccgcctgtacgggcccagctccgtgagcttcgccgatgacttcgtgcgcagcagtaagcaacactacaactgtgaacactccaagatcaacttccgagacaagcgcagcgcgctgcagtccatcaacgagtgggcctcgcagaccaccgacggcaagctgccagaggtcaccaaggatgtggagcgcacggatggggcactgctcgttaatgccatgttctttaagccgcactgggatgagaagttccaccataagatggtagacaaccgtggcttcatggtgacccgctcctacactgtgggtgttacgatgatgcaccggacaggcctctacaactactatgacgacgagaaggagaagctgcagctggtggagatgcccttggcccataagctctccagcctcatcatcctcatgccccaccacgtagaaccgctcgagcgcctggagaagttgctgaccaaggagcaactaaagacctggatggggaagatgcagaagaaggctgttgccatctccctgcccaagggagtggtggaggtgacccatgacctgcagaaacatctggccggactgggcctgactgaggccatcgacaagaacaaggcagacttatcgcgcatgtctggcaagaaggatctgtacctggccagtgtgttccacgccactgccttcgagtgggacacagagggcaacccctttgaccaggacatctacgggcgtgaggagctgcgcagccccaagctgttctatgccgaccaccccttcatcttcctggtgcgagataatcagagcggctccttgctgttcattggccgcctggtccggcccaagggagacaagatgcgagacgagttgtagagtccaagagtggtcgtggcgtggcatggcgggaagtagccagaggttcctgagacacatgggtgctattgtggggggagggggaggcaccaaccctggatagtccacgggtgggggggggttggcagtgcagatcggaattcccataggtctgagtaggtatttttagacaagagtccactccgttagacatggagcccagacactatgagaccaaattcaggggtgtcacagccattctagccctgccccacaagttttatatccaatctagcctcaacagtcaatcagtgttcatattcgtggccaagcattctgtctgtgagacaatcgagttgggtgggggtagggcggcctagcctctctgtcaccatgccctgagccctcggttttcctgttcacctctgattccctttaaccacaaaactaggagcctgtggtcccagaactgcccacccttaaaatcgattctttgccgcagcagtgggagttggggagaccatgcataggagggctccttggcatatccggccctagagccattacattacattgacaactcaactttgcttctgttttctccctttttgagtttttcaaggaatgggggtttggggaaggggaagcctttattgctttcaaaacaagaacagtttgtcaattttttttgaataaaccttttccaatg

SEQ ID NO: 259 - DNA, 1836 bp, Rattus norvegicus (Norway rat)
ctcgagaccccgtccccctcccagtggacgccaagtgcgcttgcgcggtaacagccgcccgcacttgtgccatttcccccttcttccgagccacctttcccccctccctcccttccctatccccttccctgccctgcttccctcccttccccctagactcttcgttgtggtcttcccgttcctgatccttcccctaccccacccccaatccccaggaccctggcgccccagccgcaggtgctgcgcccacgggagccacgatgtgcgtcctctcagaacctgtgggcctccttgccctcactgccctccgtttcctcctcgcaggcccccacatccttcagaatgacgttggacgtggggccagaggatgaactcccagactgggctgcggccaaagagttttaccagaagtatgaccccaaggacatcattggcagaggagtgagctctgtggtccgccgctgtgtccatcgagctactggtgatgagtttgcagtgaagatcatggaggtgtcagctgaacggctgagtcttgagcagctggaggaggtgcgggatgccacacggcgagagatgcacatccttcgccaggtcgctggccacccccacatcatcactctcatcgattcctacgagtcttctagcttcatgttcctggtgtttgacctgatgcggaaaggagagctgtttgactatctcacagagaaagtggccctctcagaaaaggaaaccaggtccattatgaggtctctgctggaggcggtgaactttcttcatgtcaacaacattgtacatcgagacctgaagcctgagaatatcctcctagatgacaatatgcagatccgcctttcagattttgggttctcctgccatttggaacctggcgagaagcttcgagagctgtgtgggactccgggatatctagcaccagagatccttaaatgctccatggatgaaacccacccaggctacggcaaggaagtcgacctctgggcttgtggggtaatcctgttcacacttctggctggctcgccaccattctggcatcgacgccaaatcctgatgctacgcatgatcatggaaggccaatatcagtttagttcacccgagtgggatgatcgttcaaacaccgtcaaagacctgatcgcaaagctgctgcaggtggatcctaacgcacgcttgaccgctgagcaagccctacagcaccccttctttgagcgctgtaaaggcagccagccctggaacctcacacctcgccagcggttccgggtggcagtgtggacaatactggctgctggacgagtagccttaagcagtcaccgtttacggccactaactaagaatgcactcttgagagacccctatgcactgcggccagtacggcgcctcattgacaactgtgccttccggctctatggacactgggtgaagaagggggagcagcagaaccgggcggccctcttccagcaccagcctcctaggcctttccccatcattgccactgacctggaaggagactccagtgctatcacagaggatgaagttaccttggtacggagctaggaccttctccctgggcaagccacgaagtaggactccccaggaggagattttctttttctatcattccaaccacttgggactcagatcttagccctgccttgccaagtctacaactgagaatgctgcttgtcacagaaaccagccctttacccctacctacctactctggacttggagatcggggcggagatggaagggaacctcttcccagcattgtgcctggccttgccatcaccgcctgtgctgcatctgaaataaaacctgctacaagcc

SEQ ID NO: 260 - DNA, 1643 bp, Rattus norvegicus (Norway rat)
ccttgctgttctccaacccctctctttccccttgcttcctctcacctgctctgggactcctaactcagagacctcccttctccccccgccggctggattatggcagagaacgatgtggacaatgagctcttggactatgaagacgatgaggtggagacggccgctggggcagatgggaccgaagctcccgccaagaaagacgtcaagggctcctatgtctccatccacagctccggctttcgagatttcctacttaagccagagttgctccgggccattgttgactgtggctttgagcatccatcagaggtccagcatgaatgcatcccccaggccattctggggatggatgtcctgtgccaggccaagtcaggcatgggaaaaacagcagtgtttgtcctggccacactgcagcagctggagccagttactgggcaggtgtcagtgctggtgatgtgtcacaccagggagctggctttccagatcagcaaggaatatgagcgcttctcaaagtacatgccgaatgtcaaggtggcagtgttttttggcggactgtctatcaagaaggatgaagaggtgctgaagaagaactgcccacacattgttgtggggactcctggccgaattctagccctggcccgaaataagagcctgaacctcaaacacattaaacactttatcttggacgaatgtgacaagatgcttgaacagctcgacatgcgtcgggatgtccaggaaatttttcgcatgaccccccatgagaagcaggtcatgatgttcagtgctaccttgagcaaagagatccgcccagtgtgccgcaagttcatgcaagatcctatggagatcttcgtggatgacgagaccaagttgacactgcacgggttgcagcaatactacgtgaaactgaaggacaacgagaagaaccggaagctctttgaccttctcgatgtcctcgagttcaaccaggttgtgatctttgtgaagtccgtgcagcgctgcatcgccttggcccagcttctagtggagcagaacttgccagccattgctatccaccgcgggatgccccaggaggagaggctctctcggtatcagcagttcaaggattttcagcggaggatacttgtggctaccaacctgtttggccgtggcatggacattgtgcgcgtgaacatcgcttttaactatgacatgccagaggactccgacacctacctgcacagggtggccagagcgggccggtttggcaccaagggcttggcatcacatttgtgtcagacgagaacgatgccaagatcctgaatgacgtgcaggaccgtttcgaggtcaacatcagtgagctgcctgatgagatcgacatttcctcctacattgaacagacacggtagaggaatcacccattctggactgtggcagtctgtgtagaagaggacgaaggggtcagggaggaaacactactgccccacccctgacacctcagcccaccctctccatgcctctctctgcgtcaccaccactcctaaacctagtcctgatttatcagagttgtttgtttgtttgtttgtttttgttttttaacaaaactaagaatgaaaaaaaaaaaaaaaaaaaaaaaaaaaagtaccttctgaggcgaaaagaaccag

SEQ ID NO: 261 - DNA, 9136 bp, Rattus norvegicus (Norway rat)
agagacggcagcagcgtcccgtccagttcgcctgccgcgctcgcttgtcgtctgcctccagatcccagacagagaagagccatggaggaggtggtgatagccggtatgtccgggaaattgcccgagtcagagaacctgcaggagttctgggccaacctcattggcggtgtggacatggtcacagacgatgacaggaggtggaaggctgggctctatgggttgcctaagcggtctggaaagctgaaggatctgtccaagttcgacgcctccttttttggggtccaccccaagcaggcacacacaatggacccgcagctccggctgctgctggaagtcagctatgaagctattgtggacggaggtatcaacccggcctcactccgaggaacaaacactggtgtctgggtgggtgtgagtggttccgaggcgtcggaggccctgagcagagatcctgagactcttctgggctacagcatggtgggctgccagagagcaatgatggccaaccggctctctttcttcttcgacttcaaaggacccagcattgccctggacacagcctgctcctctagcctactggcactacagaatgcctatcaggctatccgcagtggggagtgccctgctgccattgtgggcgggatcaacctgctgctaaagcctaacacctctgtgcagttcatgaagctaggcatgctcagccccgatggcacctgcagatcctttgatgattcagggaacgggtattgccgtgctgaggctgtcgtggcagttctgctgactaagaagtccttggctcggcgagtctatgccactattctgaatgccgggacgaacacagatggctgcaaggagcaaggcgtgacattcccctctggagaagcccaggaacaactcatccgttctctgtatcagccgggcggtgtggcccccgagtctcttgaatatattgaagcccatggcacgggcaccaaggtgggggacccccaggaactgaacggcattactcggtccctgtgtgctttccgccagagccctttgttaattggctccaccaaatccaacatgggacaccctgagcctgcctcggggcttgcagccctgaccaaggtgctgttatccctagaaaatggggtttgggcccccaacctgcatttccacaaccccaaccctgaaatcccagcacttcttgatgggcggctgcaggtggtcgataggcccctgcctgttcgtggtggcatcgtgggcatcaactcgtttggcttcggaggtgccaatgttcacgtcatcctccagcccaacacacagcaggccccagcacctgccccacatgctgccctaccgcatttgctgcatgccagtggacggaccatggaggcagtgcagggcctgctggaacagggccgccagcacagtcaggacttggcctttgtgagcatgctcaatgacattgcagcaacccctacagcagccatgcccttcagaggttacactgtgttaggtgttgagggccatgtccaggaagtgcagcaagtgcctgccagccagcgcccactctggttcatctgctcagggatgggcacacagtggcgtggaatggggctgagccttatgcgcctggacagtttccgtgagtccatcctgcgctctgatgaggctctgaagcccttgggagtcaaagtgtcagacctgctgctgagcactgatgagcacacctttgatgacatcgtgcattcctttgtgagcctcaccgccatccagattgccctcatcgacctgctgacgtctatggggctgaaacctgatggcatcattgggcactccttgggagaggttgcctgtggctatgcagatggctgtctctcccagagagaggctgtgcttgcagcctactggagaggccagtgcattaaggatgccaaccttccggctggatccatggcagctgttggtttgtcctgggaagaatgtaaacaacgctgccctcctggtgtggtgcctgcctgccacaactctgaggacactgtgaccatctctggacctcaggctgcagtgaatgaatttgtggagcagctaaagcaagagggcgtgtttgccaaggaggtgcgaacaggtggcctggccttccactcctacttcatggaaggaattgcccccacgctgctgcaggctctcaagaaggtgatccgggagccacggccacgctcagcacgctggctcagcacctctatccctgaggcccagtggcagagcagcctggcccgcacatcttctgctgagtacaacgtcaacaacctggtgagccctgtgctcttccaggaagcactgtggcacgtccccgagcacgccgtggtgctggagattgcaccccatgcactgttgcaggctgtcctgaagcgaggcgtgaagcctagctgcaccatcatccccttgatgaagagggaccataaagataacttggagttcttcctcaccaacctcggcaaggtgcacctcacaggcatcgacatcaaccctaatgccttgttcccacctgtggaattcccggttccccgagggactcctctcatctcccctcacatcaagtgggaccacagtcagacttgggatatcccagttgctgaagacttccccaacggttccagctcctcctcagctacagtctacaacattgacgccagttccgagtcatctgaccactacctggtcgaccactgcattgacggccgtgtcctcttccctggcactggctacctgtacctggtgtggaagacactggctcgaagcctgagcttgtccctagaagagacccctgtggtgtttgagaacgtgacatttcatcaggccaccatcctgcccaggacaggaaccgtgcctctggaggtgcggctgctagaggcctcacatgcatttgaggtgtctgacagtggcaacctgatagtgagcgggaaagtgtaccagtgggaagaccctgactccaagttattcgaccacccagaagtcccgatccccgccgagtccgagtctgtctcccgcttgacgcagggagaagtatacaaggagctgcggctacgtggctatgactatggccctcatttccagggcgtctatgaggccaccctcgaaggtgagcaaggcaagctgctctggaaagacaactgggtgaccttcatggacacaatgctgcagatatccatcctgggcttcagcaagcagagtctgcagctacccacccgtgtgactgccatctatattgaccctgcaacccacctgcagaaggtgtacatgctggagggagacactcaagtggctgacgtgaccacgagccgctgtctgggcgtgaccgtctctggtggtgtctacatttcgagactacagacaacagcaacctcacggcggcagcaggaacagctggtccccaccctggagaagtttgtcttcacaccccatgtggagcctgagtgcctgtctgagagtgctatcctgcagaaagagctgcagctgtgcaagggtctggcaaaggctctgcagaccaaggccacccagcaagggctgaagatgacagtgcctgggctagaggaccttccccagcatggactgcctcgactcttggctgctgcctgccagctgcagctcaacgggaacctgcaactggagttaggtgaggtactggctcgagagaggctcctgctgccagaagaccctctgatcagtggcctccttaactcccaggccctcaaggcctgcatagacacagccctggagaacctgtctactctcaagatgaaggtggtggaggtgctggctggagaaggccacttgtattcccacatctcagcactgctcaacacccagcctatgctgcaactggagtatacagccaccgaccggcacccccaggccctgaaggatgttcagaccaagctgcagcagcatgatgtagcacagggccagtgggacccttctggtcctgctcctaccaacctgggtgctcttgaccttgtggtgtgcaactgtgcgttagccaccctgggggatccagccctggccctggacaacatggtagctgccctcaaggatggtggtttcctgctaatgcacacagtgctcaaaggacatgcccttggggaaaccctggcctgcctcccttctgaggtgcagcctgggcccagcttcttaagccaggaagagtgggagagcctgttctcaaggaaggcactgcacctggtgggccttaaaaagtcattctacggtactgcgctgttcctgtgccgccgtctcagcccacaggacaagcccatcttcctgcctgtggaggatactagtttccagtgggtggactctctgaagagcattctggccacatcctcctcccagcctgtgtggctaacagccatgaactgccccacctcaggtgtggtaggcttggtgaactgtctccgaaaagagccgggtggacaccggattcggtgtatcctgctgtccaacctcagcagcacatctcacgtccccaagctggaccctggctcttcagagctacagaaggtgctagagagtgatctggtgatgaacgtgtacagggacggtgcctggggtgccttccgtcacttccagttagagcaggacaagcccgaggagcagacagcacatgcctttgtaaacgtccttacccgaggggaccttgcctccatccgctgggtctcttctcccctgaaacacatgcagccgccctcgagctcaggagcacagctctgcactgtctactatgcctcactgaacttccgagatatcatgctggccacgggcaagctgtcccctgatgccattccaggtaaatgggccagccgggactgcatgcttggcatggagttctcaggccgtgataagtgcggccggcgtgtgatggggctggtacccgcagaaggcctggccacctcagtcctgttatcacccgacttcctctgggatgtaccctctagctggaccctggaggaggcggcttctgtgcctgttgtctacaccaccgcctactactccttagtagtgcgtggtcgtattcagcacggggaaactgtgctcattcactcgggctccggtggtgtgggccaagcggccatttccattgcccttagcctgggctgccgagtcttcaccactgtgggctccgctgagaagcgagcttacctccaggccagattccctcagctggatgacaccagctttgctaactctcgagacacatcgtttgagcagcatgtgttactgcacacaggtggcaaaggggtggacctggtcctcaactccctggcagaagagaagctgcaggccagtgtgcggtgcttggctcagcatggccgcttcctagagatcggcaaatttgatctttctaacaaccaccctctgggcatggccatcttcttgaagaacgtcactttccatgggatcctgctggatgcactttttgagggggccaacgacagctggcgggaggtggcagagctgctgaaggccggcatccgtgatggggttgtgaagcctctcaagtgtacagtgtttcccaaggcccaggtggaggacgccttccgatacatggctcaaggaaaacatattggcaaagtccttgtccaggtacgggaggaggagcccgaggctatgctgccaggggctcagcccaccctgatttccgccatctccaagaccttctgcccagagcataagagttacatcatcactggtggcctaggtggctttggcctggaactggcccggtggcttgtgcttcgtggggcccaaaggcttgtactaacttcccgatctggaatccgcacaggctaccaagccaagcacgttcgggagtggaggcgccagggcatccatgtgctagtgtcgacaagcaatgtcagttcactggagggggcccgtgctctcatcgctgaagccacaaagcttgggcccgttggaggtgtcttcaacctggccatggttttaagggatgccatgctggagaaccagactccagaactcttccaggatgtcaacaagcccaagtacaatggcaccctgaaccttgacagggcgacccgggaagcctgtcctgagctggactactttgtggccttctcctctgtaagctgcgggcgtggtaatgctggccaatccaactatggcttcgccaactctaccatggagcgtatttgcgaacagcgccggcacgatggcctcccaggtcttgccgtgcaatggggtgccattggtgacgtgggcattatcttggaagcgatgggtaccaatgacacagtcgttggcggcacactgccacagcgcatctcctcctgcatggaggtgctggacctcttcctgaatcagccccacgcagtcctgagcagttttgtgctggttgagaagaaagctgtggcccatggtgatggtgaagcccagagggatctggtgaaagcagtggcacacatcctaggcatccgcgacctcgcagggattaacctggacagctcgctggcagacctcggcctggactcgctcatgggtgtggaagtgcgccagatcctggaacgtgaacatgatctggtgctacccattcgtgaagtacggcaactcacactgcggaagcttcaggaaatgtcctccaaggctggctcagacactgagttggcagcccccaagtccaagaatgatacatccctgaagcaggcccagctgaatctgagtatcctgctggtgaaccctgagggccctaccttaacacgactcaactcagtgcagagctctgagcggcctctgttcctggtgcaccccattgaaggttccatcactgtgttccacagcctggctgccaagctcagtgtgcccacctacggtctgcagtgcacccaagcggcccccctggacagcattccaaacctggctgcctactacattgattgcatcaagcaggtgcagcctgaggggccccaccgagtggctgggtattcttttggagcttgtgtagccttcgagatgtgctcccagctgcaggcccagcagggcccagcccccgcccacaacaacctcttcttgtttgatggctcacacacctacgtattggcgtacacccagagctaccgggcaaagctgaccccaggctgtgaggctgaggctgaagctgaagccatatgcttcttcattaagcagtttgttgatgcagagcatagcaaggtgctagaggccctgctaccactgaagagcctggaggaccgggttgctgctgctgtggacctcatcactagaagccaccagagcctggaccgccgtgacctgagctttgctgccgtgtccttctactacaagcttcgagccgccgaccagtataaacccaaggccaagtaccacggcaatgtgatcctgctgcgggccaagacaggtggcacctacggcgaggacttgggtgccgattacaacctgtcccaggtgtgtgatgggaaggtgtctgtgcacatcattgagggtgaccatcgtacgctgctggagggcaggggcctggagtctatcatcaacatcatccacagctccctggctgagcctcgagtgagtgtacgggagggctagacctgcctaccatgaagccacgacccacaccggccaccagagatgctccgatccccatcacaccctgagtgcagggactggggagggtcctgctggtgggaccccctcaccccagtggcccagcaccaccccctcccctggtggctgctacaaacaggaccatcacatgtgtcccagccacttagtggggttcccagagccactgacttggaggcaccctggtctgtgaagagtcagtggaggccagcaagagccaaactgagccttttctgccaagtgacatttgtcacactggttgtttctccattaaattctcatatttattgcattgctgggaaagaccgcccaccccagggttaactcattccagaacccctaaagtgggaaaagccatgtggggaaggctgctggctggagcccctttttgtcttagccctgtacccgctcactgcagggcagggtatggagagggctggttcccggggaacgaggaccccagcagacactgtagcccatggcccttggtccccagcactcccggctgcacccatgatgcagggcctaccagactctgcggaccgcaccgggcactcactgtatttgttttccaagattcaaattgctgcttgggttttgaatttactgcagctgtcagtgtaaagaaacatgtctgaactgtgtcctttttacaccaacctggtaaaaatgctcttgatgctgtcccgttgccacaattaaactgcacgtgagctctggcttccgttcagtctctttccagtcccagacctgagtccccagagcctccacagctcttacagtgagaatcaaattggcccactccttggaaggcgtggcattctgtcagagtaaaaggaaagtagagtgtgctgattcacgttcagcgtgtggggctggctagagaccttggcactgtagtgaacagaatgtgtccacctttaagtcaccctgaaggcatcaccatagctacagcctcacccaggggtagagaatagtactgtctacttgttgactacctggcagttggtgccagcccctatagaggaaaacagcagtgtgtggccactgtgagaagcatatccctggaaacaggtgaccagagcagagggctaatgcctacctgagtcacacaaaactgaccaggcttgagtgtccagaagagtctatcagaaggccacagcattcagtcctatccacagagagcagcagactaagttgtctccttgccagcttagaaaactgcagtgctggggtacaggtagggtgttcaggaggtccgggccccagtgattagtctaagactgaagcatctggttggctgtggtcccacctagaaaattcttaaagctcttgtcatgtacttcctgggaaggacctaccctgtctcaataatgtctctagctcgttggagtctactgactcaaacatttataaagtgtcctagaaaggcctgactcccctacaaggctgtgtgatccttcaaactcacatatgtgagccaataaaaccttgagactct

SEQ ID NO: 262 - DNA, 3679 bp, Rattus norvegicus (Norway rat)
tgacatggtaaagagtctggccacagataaaggaccgaaatgactgactcaaaatacttcacaacaaccaagaaaggggagatcttcgagttgaaggcagagcttaacagtgacaagaaggagaagaagaaggaggcagtaaagaaagtgattgcatcaatgaccgtgggcaaagatgtcagtgctctcttccctgatgtggtgaactgcatgcagacagacaacctggagctaaagaagctggtgtacctgtacttgatgaactatgccaagagtcagcctgacatggccattatggctgtcaacaccttcgtgaaggactgtgaggaccccaacccccttatccgggccctggctgtgaggactatgggctgcatccgagttgacaagatcacagagtacttgtgtgaaccactccggaaatgcctgaaggatgaagacccatatgtgcgcaagacagcagctgtgtgtgtagccaagctccacgacatcaacgcccagctggtagaggaccagggtttcctggacacactcaaagacctcatctctgactctaaccccatggtggtagcaaatcgagtggctgccctgtcagagatcgctgagtctcaccccagtagcaacctgcttgacttgaaggcacagtctatcaacaagctgctgacggcccttaatgagtgcaccgagtgggcccagatcttcattctggactgtctgggcaactacatgcccaaggatgaccgtgaggcccagagcatctgcgagcgggtcactcctaggctttcccatgccaactctgctgtggtgctgtccgcagtgaaggtcctgatgaagttcatggagatgctgtctaaggacctggactactatgccacactactcaagaagctggcccctcccctggtcaccctgctgtcagcagagccagagccgcagtatgtgcctctgcgcaatattaacctcattgtacagaaaaggccagagattttgaagcatgaaatgaaggttttctttgtgaagtacaatgaccccatctatgtgaagctggagaaactggacattatgatccgcctggcctcccaggccaacattgcccaggttttggcagaactcaaagagtacgcgacagaagtagatgtggattttgtacggaaggcagtgcgtgccattggccgctgtgccatcaaggtggagcaatctgcagagcgctgtgtgagcacattgcttgatctcatccagaccaaggtcaactatgtggtccaggaagccattgtggtcattaaagacatcttccgcaagtaccccaacaagtacgagagtgtgatagccacactgtgtgagaatctggactcgctggatgagcctgaggctcgcgctgctatgatctggatagtgggcgagtatgctgagcggattgacaatgcggacgagctgcttgagagcttcctcgacggcttccatgacgagagcacccaggtccagctacagctgctgacagccattgtgaagctcttcctgaagaagccaacagagacgcaggagctggtgcagcaggtcctcagtttggccactcaggactcggacaatccagaccttcgggaccgtggctacatctactggcgcctgctctccacggaccctgtagctgccaaagaggtggtactggctgagaagcccctcatctcagaagagacagaccttattgagcccacactgctggatgaactcatctgctacattggcacactggcctctgtctaccacaagccacccaatgcctttgtggagggcggccggggagtggtgcacaagagtctgccacctcgcactgcctcgagcgaaagcacagagagccctgaggcagcccctgccggagcacctgctagtgaccagcctgatgtcattcctgcccagggtgacctgttaggtgacctcctcaacctggaccttgggcccccagtgagtggcccacccttggctgcctcctcagtgcagatgggagctgtggatcttcttggtggtggcctcgacagcctgatgggggatgagcctgaagggattggagacagcaactttggggcacctccagcatcagtggcggcggcagcaccagccagacttggagcacccgtcagcagtggcttaagtgacctctttgacctgaccagtggagtgggcaccctctcagggtcctatgtcgctcccaaagcagtttggctccctgccatgaaggccaaggggctggaaatctctggcaccttcacccggcaggttggctccatctccatggatctgcagctgactaacaaggccctgcaggtcatgacagatttcgctatccagtttaatcggaacagctttggcttggcccccgctgcgccactccaagtgcacgccccactgagccccaaccagacggtggagatctccctgcctcttaacacggtgggctcagtcatgaagatggagcctctgaacaatcttcaggtggctgtgaagaacaacattgacgtcttctacttcagcactttgtacccactgcatgtcctcttcgtggaggacgggaagatggaccggcagatgttcctggccacatggaaggacattcccaacgagaatgaagcccagttccagatcagagactgcccgctgaacacagaggctgcaagcagcaagctgcaaagcagtaacattttcactgtcgccaagaggactgtggagggccaggacatgctctaccaatctctgaagttgaccaatggcatctgggtgctggcagagctgcggatccagccaggcaaccccagtttcacgctgtccctgaagtgtcgagccccagaggtgtcccagcatgatatccaggcctacgagaccatcctcaagaactgaagtccctctcgctccaccccagccttctccttctgccagcccagccatggaaccctgtggtggcagcacctcctcctttctttggggagaagccagtgggctcctgacccacccaggaggcctcccctgatcctaactgagggcctggagcagggccaggtctcctagagtgaaatctccgtgcatctccagtggctgcttttttctattgctgttgatgtgggatcaaaggaagtggatccagcacagcatcagaagctggacgggggccacagggtgctcttccttccttctgctctcctggggtgaacatggaaccctcctggggtcccagcccataatccctgccctgtctcctcagtgagcctgtctgggtagagtcctctgggtgccaatattactgtttgggactctgagagctggaggtggtgatggacagacatgagcccaggggagcaacctgggctggcactgtctgccccatataacaccagttggtgctctgtgaccacctgcatggcccagagcccgatctaggattctgttcccttaggccctggaggatggtcactgcctaccaaacattcctcggtgtcctctctgtgagtccagggctctcagaccagaagtggggtgaaaggtggggcaaggggcagtgggaccgcttctagtgtgagctcctgacccactggctgccctggctccccagtctgtgtgtgacagtgacaggttgatcgtcgctactgtttgataataaagagttctgcttttggcaaaaaaaaaaaaaaaa

SEQ ID NO: 263 - DNA, 1663 bp, Rattus norvegicus (Norway rat)
cagccacattttgtccacaaactctgtcctgaaaggggactgactgaagaaaacatccagcaagctctgggcaaggaaggacagcagcagagagcgagggccgtgttcgctgtgccagaggatggaggtgcacaacgtatcagcccctttcaatttctccctgccgcctggctttggccaccgggccacagacaaggcgcttagcatcatcctggtgttaatgttgctgcttatcatgctctcactgggctgcaccatggaattcagcaagatcaaggctcacttgtggaagcccaaaggggtgatcgttgccttggtggcccagtttggcatcatgcccctcgctgcttttcttctcggcaagatctttcacctgagcaacattgaagctctggccatcctcatctgtggctgctctcccggggggaacttgtccaacctcttcaccctggccatgaagggggacatgaacctcagcatcgtgatgaccacctgctccagcttcagtgccttgggcatgatgccactcctcttatacgtctacagcaaaggcatctacgatggagaccttaaggacaaggtgccctacaaaggcattatgatatcactagtcatagttctcattccttgcaccatagggatcgtcctcaagtccaaaaggccacactatgtaccctacatcctcaagggaggcatgatcatcaccttcctcctctctgtggctgtcacagccctctctgtcatcaatgtgggcaacagcatcatgttcgtcatgacaccacacttactggctacctcctccctgatgcccttctctggctttctgatgggttacattctctctgctctcttccaactcaatccaagctgcagacgcaccatcagcatggaaacaggattccaaaacattcaactctgttctaccatcctcaatgtgaccttcccccctgaagtcattgggccacttttcttctttcctctcctctacatgattttccagcttgcagaaggacttctcatcatcattatcttccggtgctatgagaaaatcaagcctccaaaggaccaaacaaaaattacctacaaagctgctgcaactgaggatgctactccagcagctctggaaaaaggtacccacaatgggaatattcctcctctccaacctggtccttcccctaatggcctgaattctggtcagatggcaaattagaatgtgaaacttcgaagcagcaagaaaaggaacgaacgtcgacgttgccggaatgtttgtctagcacttcgggcaaaccatcagaaccatggagccatgaactgagacagaagggcatctatctatccagtaactgtaacccataccaatttgcttttgtttaaattttctatttaaaagataaacaagaattaggcaaaaatgttcctgcctataatcccgatgctcagaaactcaagatcaaccttaagtatacaaaacaagactgtctcaagaaaccaaaaacacttttcagtggctatgaactctatgaaagctgaaccaaacagcttcatctgataaacattaacttcactatttccaaactttccagtaagcaggtgttttgttcattaaacatccacaacctgcttcatgttactcaaaatgaaataaagtgcaactcctagttct

SEQ ID NO: 264 - DNA, 485 bp, Rattus norvegicus (Norway rat)
gaattcatttctctactgaaaccttaaagtagtatttggtcattcattgtatgtgtcttatatacccacccacacacagacacaaaggaaatctatcaaattaatcctgatgtattcgaagtggttattcaattcatttatggcagagcaatatcagtcctaatgactcgtgaaagtgttactaactgaatcattatcttacatttactgtttagtaagcatattttgaaaaatgtatggctagagtgtcataataaaatggtatatctttctttagtaattacattaaaattaatcatgtttgattaactggttcctctgatgtagtgtgtcatttcttaacatatagagaactgtagagcatttttttatttaatggcagtgtttgcaactcacaggcacagaaacactcagactaatcatttatcatagagatatagaacttacaggttaaagtattcacaatgtatgtaagagagttatga

SEQ ID NO: 265 - DNA, 4254 bp, Rattus norvegicus (Norway rat)
gctcccatcttcgaggctcagctcaactcagagctacttcttccaaattctacatcttggcggacttcgcgaaggaaacccggagtgttacgtgaggtcctgatggagtttgaagagggccttaacggaagagcagacaagaacttctcaaagatgggcaaaaagagtaaaaaggagaaggagaagaaacctgctgttggcatattcgggatgtttcgctatgcagattggcttgacaagctgtgcatggctctgggaactctcgctgctatcatccacggaaccctgcttcccctcctgatgctggtgttcggatacatgacagatagttttaccccaagcagagacccgcattctgaccgagcgattactaatcaaagtgaaatcaacagtacacataccgtcagcgacacgagtctggaggaggacatggccatgtatgcctactattacacgggcattggtgccggtgtgctcatcgttgcctacatccaggtttcactttggtgcctggcagctgggagacaaatacacaagattaggcagaagtttttccatgccatcatgaatcaggagataggctggtttgacgtgaatgacgctggggagctcaacacccgtctcacagatgacgtctccaaaattaatgacggaattggtgacaaacttggaatgttctttcagtccataacgacattttcagccggttttataataggatttataagtggttggaagctaacccttgtaattttggccgtcagccctcttattgggttgtcatctgccatgtgggcaaaggtactgacttcatttactaataaggaactccaggcttatgcgaaagctggagcagttgccgaagaagtcttagcagccatcagaactgtgattgcgtttggaggacaaaagaaggaacttgaaaggtacaataaaaatttagaagaagctaaaagagttggcataaagaaagccatcacggccaacatttccataggtattgcctacctgttggtctatgcgtcttatgcactggcattctggtatgggacctccttggtcctctcaaatgaatattctattggacaagtgcttaccgtcttcttctctattttattggggactttcagtattggacatttagccccaaacatagaagcctttgcaaatgcaagaggggcagcctatgaaatcttcaagataattgataatgagccaagcatcgacagcttctcaaccaagggacacaaaccagacagtataatgggaaatttggaatttaaaaatgtttacttcaactacccatcacgaagtgaagttaagatcttgaagggcctcaacctgaaggtgaagagcgggcagacggtagccctggttggcaacagtggctgtgggaaaagcacaactgtccagctgctgcagaggctctacgaccccatagagggcgaggtcagtattgacggacaggacatcaggaccatcaatgtgaggtatctgcgggaaatcattggggtggtgagtcaggaacccgtgctgtttgccaccacgattgccgaaaacattcgctatggccgagaaaacgtcaccatggatgagatagagaaagctgtcaaggaagccaatgcctatgacttcatcatgaaactgccccacaaatttgacaccctggttggtgagagaggggcgcagctgagtgggggacagaaacagaggatcgccattgcccgggccctggtccgcaaccccaagatccttttgttggatgaggccacgtcagccttggacacagaaagcgaagccgtggttcaggccgctctggataaggctagagaaggccggaccaccattgtgatagctcaccgcttgtctacagtgcgcaatgctgacgtcattgctggttttgatggtggtgtcattgtggagcaaggaaatcatgaagagctcatgaaagagaagggcatttacttcaaacttgtcatgacacagactagaggaaatgaaattgaaccaggaaataatgcttatgaatcccaaagtgacactggtgcctctgagttgacttcagaagaatcaaaatctcctttaataaggagatcaattcgcagaagtatccacagaagacaagaccaggagagaagacttagttcgaaagaggatgtggatgaagatgtgcctatggtttccttttggcagatcctaaagctaaatattagtgaatggccctatttagttgtgggtgtactttgtgctgttataaatgggtgcatacaaccagtgtttgccatagtgttttcaaagattgtaggggttttttcaagagacgacgaccatgaaaccaaacaacggaattgtaacttgttttcccttctctttctggtcatgggaatgatttcttttgttacgtacttctttcaaggcttcacatttggcaaagctggagagatcctcaccaagcgactccgatacatggtcttcaaatccatgctgcgacaggatataagctggtttgatgaccataaaaacaccactggctcgctgactaccaggctcgctagtgacgcttctaatgttaaaggggctatgggctccaggcttgctgtagttacccagaatgtagcaaaccttggcacaggaattatcttatccttagtcttagtctatggctggcagcttacacttttacttgtagtaattataccactcattgtcttgggtggaattattgaaatgaaactgttgtctggtcaagccttgaaggacaagaaagagctagagatctctgggaagatcgctacagaagcaattgaaaacttccgcactgttgtctctttgactcgggagcagaagtttgaaactatgtatgcccagagcttgcagataccatacagaaatgctttgaagaaagcacacgtctttgggatcaccttcgccttcacccaggccatgatttatttttcctatgctgcttgtttccggttcggtgcctacttggtggcacgagaactcatgacgtttgaaaatgttatgttggtattttctgctgttgtctttggtgccatggcagcagggaataccagttcattcgctcctgactacgcgaaggccaaagtctcggcatcccacatcattgggatcattgagaaaatccccgagattgacagctacagcacggagggcttgaagcctaattggttagaaggaaatgtgaaatttaatggagtcaagttcaactatcccacccgacccaacatcccagtgcttcagggactgagcttcgaggtgaagaaggggcagacgctccgcctggtgggcagcagtggctgcgggaagagcacggtggtccagctgctcgagcgcttctacaaccccatggctggaacagtgtttctagatggcaaagaaataaagcaactcaatgtccagtgcgtccgcgcactgggcattgtgtcccaggagcccatcctgtttgactgcagcatcgccgagaacatcgcctacggagacaacagccgtgtcgtgtctcatgaggagatcgtgagggccgccagggaggccaacatccaccagttcatcgactcactgcctgagaaatacaacaccagagtgggagacaaagggactcagctgtcgggcgggcagaagcagcgcatcgccatcgcgcgcgccctcgtcagacagcctcacatcttacttctggatgaagcgacatcagctctggatacggagagtgaaaaggtcgtccaggaagcgctggacaaagccagggaaggccgcacctgcgttgtgatcgcgcaccgcctgtccaccatccagaacgcagacttgatcgtggtgattcagaacggccaggtcaaggagcacggcacccaccagcagctgctggcccagaaaggcatctatttctcgatggttcaggctggagcaaagcgctcatgagctgggagtatttgaggtgctaagtatttctaatattggtgttcaaacatggcacgtaaccaaagttaaaaggttaaaagcactgttaaaggtaatttcatcaagacgagaagccttcagagacttcataattaaatgaaccgaaattgaaaaaaaaatcattaaacagggccacattttttaattgtattatgtgattcaagagaacatatagtttttttaaaaagaaatgtgtagttttgtttcagtttttttaatttctaccctattcccttaaatgatcataaaggctgtaaaaagcactatttttttgcggcc

SEQ ID NO: 266 - DNA, 2667 bp, Rattus sp.
gtaaactgctctgtggactgccaactccaggtcttcaattggtcctgtccatctactccctcaactcccccaccctcaacaccaacaacaccaacatcctcccagacaaccacaccctccacaccatctaccacatcttcgaagtctacaccctctacgccccaatccacatcatccaagtcaacgcccagcacaccacccaaaaccacccttcctgggtgcctcgattttgatcctcccagacaggtcaatgagacctggtggctgtgtaactgtaccatggccatctgcaaatatgacaacgtagtggagattgtggagctggagtgcaaccccccacccatgcccacctgttccaatggcctcaaacccgtgcgtgtccctgaccctgatggctgctgctggcactgggaatgtgactgctactgcactggctggggggacccacactttgtcaccttcgatggactttactacagttaccagggtaactgtacctatgtgctggtagaggagattacccccacagtggacaactttggggtctacattgacaactaccactgcgatgccaacgacaaggtgtcctgcccccgcacacttattgtgcaccatgagacccaggaagtgctgatcaagactgtgcacatgatgcccattgaggtggaggtacaggtgaacaagcagttagtggctttgccctacaagaagtatggactggaggtataccaatctggcatcaactttgtggtggacatccccaggctgggtgcccaggtctcctacaatggcctgtctttctccatccggctgccttaccacctgtttggcaacaacacaaagggccaatgtggcacctgcaccaacaatactgctgatgactgtatcctacccagtggggagatcatttctaactgtgaagttgctgctgatgagtggttggtgaatgacccgtccaagccacactgtccccacaaaggcctcaccactaagcgcccagccatcacgacaccaggacctttccctgaaaactgcactgtgtctcctgtctgtcagctcatcatggacagcttattctcccagtgccaccccttcgtgcctcccaagcactactacgaagcttgcctgtttgatagctgctttgtggctggctctggtatggagtgtgccagtgtacaggcctatgctgccctctgtgctcaggaaggtgtctgcattgactggcggaatcacacccagggggcctgcgctgtgacgtgtccagctcacaggcagtatcaggcctgtggcccttcagaggaacccacctgccagtccagctcccctaagaattccacgctcttggtggaaggctgcttctgtcctgaagggaccacaaagtttgcccctggctatgacgtctgtgtgaagatatgtggatgtgtgggaccggacaatgtgcccagagagtttggagagcactttgaatttgactgcaaggactgtgtttgcctggagggtggaagtggtattgtctgccaaccaaagaagtgtgctaggggcaacctgaccacatgtgaggaggatggcacctaccttgttgtggaggccgacccagatgacaagtgctgcaacaccacctcatgtaagtgtgaccccaaacggtgcaaagctgaacgcccctcatgtctgctgggattcgaagtgaagagtgagcacgtgcctgggaaatgctgtcctgtctactcctgtgtgcccaagggtgtgtgcgtgcacgagaatgctgaataccagcctggatccccagtgtactctaacaagtgccaggactgtgtatgcaccgacagcatggacaacagcacccagctcaatgtcatctcctgtacccatgtgccctgcaacatctcctgcagctctggctttgagcttgtggaggttcctggggaatgttgcaagaagtgccagcagacccattgcatcatcaagaggcccgagcagcagtacatcattctgaagcctggggagatacagaaaaaccccaacgacaggtgcaccttcttcagctgcatgaaaatcaacaatcagctcatctcttcagtctccaatatcacctgccctgactttgacccaagtgattgtgttccgggctccatcacatacatgccgaatggctgctgtaagacatgcatccataaccctaacaacacagtcccttgctctgccatacccgtcatgaaggagatttcctacaatggctgcgccaagaacatctccatgaacttctgcgctgggtcctgtgggacttttgccatgtactctgcccaggcccaggatctggatcatgggtgttcttgctgcagggaggagaggaccagtgtacgaatggtttccctggactgcccagatggcagtaagctgagccatagctacacacacatcgagagctgtctgtgccagggcaccgtctgtgagctgccacaggcccagcaaagccgcaccaggcgttctagtccccggcttctaggaaggaagtgaacgggttacaccgtgcacatctcttcccatcttgagccatcctgctgattctctgagcttccccacttcctgcttgacttcttctctgcacatatttattttcggagtttctgttccattctttgctttctgataataaactcaggcatagcc

SEQ ID NO: 267 - DNA, 840 bp, Rattus norvegicus (Norway rat)
atcacgacagcctactacaggggtgccatgggtatcatgctggtctacgacattaccaatgagaagtccttcgacaacatccggaattccattcggaacattgaggagcatgcctctgcagatgtggagaagatgatactggggaataagtgtgatgtgaacgacaagaggcaggtgtccaaggaacggggagaaaagctggcactcgactatgggatcaagttcatggagaccagcgcgaaggccaacatcaatgtggagaacgcatttttcactctcgccagggatatcaaagcaaaaatggacaaaaattggaacccaacaaccctcaggagcagccatggagtcaagatcacagtggagcagcagaagaggaggagcttcttccggtgcagtctcctgtgaggacaaggtctctgcccatttgagcctgcgctcagcccagctgactgtgcctgccccgggcgagcctccacctccgatgctcggacacagctgcccggactcaattgagaaattgattattttagtaaccgtctgatcttttccaccttcagagatggaccaagttagaattttgctgtttttcctgtgtcatctgccagtcaggcctatccgtcccctgccgcattgccatagatggagagaggtgggttggggcaaggcagcctccatctccagccttctgcccctccaccacagaagggaggtcagtggcagtggcagtgccagcctgcctggccccatactccaagcaccaccaccagggccactgagggcaagctggcaccctgccttcacccgttctcagttgtggacaagtgacaacttgtccactgt

SEQ ID NO: 268 - DNA, 2042 bp, Rattus norvegicus (Norway rat)
gaacataaagtcagattgctaaacttctgtgtcgactgaaaaacatggtgaagcgagttgcaattgtgggagctggggtcagtggcctggcctccatcaagtgctgcctggaagaaggactagaacccacctgcttcgagagaagctgtgacttgggaggactttggagattcacggaacatgttgaagaaggaagagccagcctttacaactcagtggtttctaacagcagcaaggagatgtcttgttactccgatttcccttttccagaagactacccaaactttgtgccaaattctctgttcctggaatatctccagctgtatgcaacccagttcaaccttctgagatgcatctatttcaacaccaaagtgtgcagtataacaaaacgcccagatttcgctgtctctggacaatgggaagtggtcactgtctgtcaagggaagcaaagctcagacacctttgctgctgtcatggtctgcactgggtttctaactaacccacatctgcccctggattcctttccaggcatacaaacttttaaggggcagtacttccacagccggcagtataaacatccagacgtatttaaggacaagcgagtccttgtggttggaatgggaaattctggtacagacattgccgtggaggccagtcacttagcgaaaaaggtgtttctcagcaccaccggaggggcatgggtgatcagccgagtctttgattcagggtacccctgggacatgatattcatgacgcgatttcagaacatgctcagaaatcttctcccaactccagttgtgagttggttgatatcaaagaagatgaacagctggttcaaccacgtgaattacggtgtggctccagaagacaggactcagctgagagagcctgtgctgaatgatgagctcccaggccgcatcatcactgggaaagtgttgatcaagcccagcatcaaggaggtgaaagaaaactctgtcgtctttaacaatacaccgaaggaggagcctattgacgtcatcgtctttgccactggatactcctttgcgttccccttcctcgatgaatcaatagtgaaagttgaggatggccaggcatcactgtacaagtacatcttcccggcacatctgccaaaaccaactctggccgtgattggcctcatcaaacccctgggttccatgatacccacaggagagacacaagctcgatgggttgttcaggtcctgaaaggtgcgactacattaccacccccgagtgtcatgatgaaagaagtcaatgaacggaagaagaacaagcatagcggatttggcttgtgctactgcaaggctttgcaatccgattacataacgtacatagatgacctcctgacctcgatcaacgcaaaaccggacctgcgggccatgctcctgactgacccacgcctggctctgagcatcttcttcggcccatgcacaccttaccatttccgcctgactggtccaggaaagtgggaaggagccagaaaggccatcttgacccagtgggaccgaacagtgaacgtcaccaaaactcgaaccgtacaagaaaccccatctacctttgaaactttgcttaaactctttagttttctggctttgcttgtggctgttttctttattttcctgtaagtgaaagatctaactggctttccaaatgtgtggagtataaccttccaacttctctaatgtaacaatttcaccttcgtaattgtaaaccacgtccagagacacccaacccctacctctccccaactcacctcattggcaccttcattgctgggtctcttgctagtccatcaggtttagtgcaagaaaataatgtccagcaattctgttcacttaaaatgttggaaggatccaggccccctttcaggaagaatctgcccccagagaggactctgagcattctttcaatctaaaaaactgctttccctagatcttaatgaaaagcccaacttcgcggaatattggtctgcactaaaatagttctctgtgtattagttgactacaaataaaatggaagaaact

SEQ ID NO: 269 - DNA, 1898 bp, Rattus norvegicus (Norway rat)
taagtacctgagggtaaggtgttgttctctctcatatggtcatatagtcttctgagtagtctaaacctcattatatgacccaaactggctttgaactctttttttttttttttttttttttttggttctttttttcggagctggggaccgaacccagggccttgcgcttcctaggcaagcgctcactgagctaaatccccaaccccggctttgaactcttgatcttgttgcctcaccacttcgaagggctggaaaaataagtgacctcacctagctagaatcagagatgtaagaagtgctttgccagagttggaaataggaagctgcgaggctggttattccaggatcttaataacaacatcagccagaagtacttgaagtgctacaaacaggaagtagatagccgaattcccagacttttggtctggatgtactgacaccgcccaccgctcggtgggctgatggccctcgcgccaccctttcattggccagtcgtcacaaggcccatactcacacgaggtcattcagccaatcagcgaactcggcctcgcccatcatgaggcgcaagtgtcttacttgcggcttggtccgcggcaggctgggagtcgtagtattatatttgggttctgcctactgagccgggagtctgggaactacaactcccagagtgctgagcggatgcacgctctgcttttaggtgtaagccgcaaacatcttggaccccgggagaatccgcgttgaagcacagagcatttagctcctctgtcagaatgaatggggaccagaaactggatgttcataaccaagaaaagcagaatttcatccagcacttctcccagattgtcaaggtgctgactgaggatgaactgggacacccagagaagggagatgctattacccggatcaaagaggtcctggagtacaacactgtaggaggcaagtacaatcggggtctgacggtggtacagaccttccaggaactggtggaaccaaggaaacaggatgctgagagcctacagcgggccctgacggtgggctggtgtgtagaactgctccaggctttcttcctcgtgttagatgacatcatggactcttcctacactcgccgggggcagatctgctggtatcagaagccgggcataggcttggatgccatcaacgatgctctgcttctggaagccgctatctaccgcctgcttaagttctactgcagggagcagccctactacctcaacctgctggagctctttctacagagttcctatcagactgagatcgggcagactctcgacctcatcacagcaccccagggccaagtggatcttggtagatacactgaaaagaggtacaaatctatcgtcaagtacaagacagctttctactctttctacctgcctatcgcggctgccatgtacatggctggaattgatggggagaaggaacacgctaatgccctgaagatcctgctggagatgggcgagttcttccagaaccaggacgactaccttgatctctttggagaccccagtgtgaccggaaaggtcggcactgacatccaggacaacaaatgcagctggctggtggttcagtgtctgctacgagccactcctcagcagcgccagatcttagaggagaattatgggcagaaggacccagaaaaagtggcgcgggtgaaagcactgtacgaggagctggatctgcggagtgtgttcttcaagtacgaggaagacagttacaaccgcctcaagagtctcatagagcagtgctccgcgcccctgcccccatccatcttcctggaactagcaaacaagatctacaagcggagaaagtaacctcgaattgtagaggctgcgagggaggggtctcaataaattattgttcaacaaaaaaaaaaaaaa

SEQ ID NO: 270 - DNA, 522 bp, Rattus norvegicus (rat)
ctggagctctttctacagagttcctatcagactgagatcgggcagactctcgacctcatcacagcaccccagggccaagtggatcttggtagatacactgaaaagaggtacaaatctatcgtcaagtacaagacagctttctactctttctacctgcctatcgcggctgccatgtacatggctggaattgatggggagaaggaacacgctaatgccctgaagatcctgctggagatgggcgagttcttccagaaccaggacgactaccttgatctctttggagaccccagtgtgaccggaaaggtcggcactgacatccaggacaacaaatgcagctggctggtggttcagtgtctgctacgagccactcctcagcagcgccagatcttagaggagaattatgggcagaaggacccagaaaaagtggcgcgggtgaaagcactgtacgaggagctggatctgcggagtgtgttcttcaagtacgaggaagacagttacaaccgcctcaagagtctcatagag

SEQ ID NO: 271 - DNA, 1859 bp, Rattus norvegicus (Norway rat)
ggcacgagcggtctcggcgctgtggccatgcctggcggcaccttagcggctgtcctgagcccgacacaaccccggtagaggactccccgggcccggctggcccggccatgcagctagagacgcaggacgcgctgtacgtggcgctggagctggttatcgccgcgctggcagtggcgggcaacgtgctggtgtgcgctgcggtgggagcctcgagtgctttacagacccccaccaactactttctggtgtccctggcgacggcggacgtggctgtgggactcttcgccatcccctttgccatcaccatcagcctgggcttctgcacggactttcacagctgcctcttcctcgcctgcttcgtgctggtgctcacacagagctccatctttagcctcttggcggtggctgtcgaccggtatctggccattcgcgtcccgctcaggtataaaggtttggtcactggaacacgagcaagagggatcatcgctgtcctctgggtccttgcctttggcattggactgactcctttcctgggttggaacagtaaagaccgtgccaccagcaactgcacagaacctggggatggcatcacgaataagagctgctgccctgtgaagtgtctctttgagaacgtagttcccatgagctacatggtttatttcaacttctttgggtgtgtccttcctccactgctcatcatgatggtgatctacatcaaaatcttcatggtggcctgcaagcagcttcagcacatggaactgatggagcactccaggaccacgctgcagcgggagatccacgcggccaagtcactggctatgattgtgggcatctttgctctgtgttggctccccgtgcatgccatcaactgcatcaccctcttccatccagccctggccaaggacaagcccaaatgggtgatgaatgtggccatcctcctgtcacacgccaattcagttgtcaatcccattgtctatgcctacaggaaccgggacttccgctacagtttccacaggatcatctccagatacgttctctgccagacggacaccaagggtgggagcgggcaggccgggggacagtcaactttcagtctgagcttgtgacctaggctctggcctttgggagaagaaggcttaaaataaacaatggactggacacagctggtgacctcactgtggaggacaactaccctctcaagcatgtggcccacctgccctgaacgcttgccaggagtcacacaagtctggctcacacgtacatgcaactaggaggccctgaggctaacagatacacttaggaatctattcagctgctcttacttactgtgtggatggcgggcggctagaactgattccaaaaactgttttatttttaagaatctgcctcattcgtggtagaaaaatgactgaaacttaccttactgtgaaacactgtgaactatataatgtaagtatttttcacttacagcaatgggaaaataaaagttggctctattaacatatactcattccggggacagcaactcagaaaactgaagtataattcttcagtcaagatactgtagtgttaatttagggaatggtactaccctaagtttgaaagtagaattatgtaacaaaacaatttgagttcagtatcttccttgcccacaaaacactagaggtggaaacttggagagctgggtccttcctccactgcacccctgctttagagctaggtactagagtttgcttctctctcacattacagtttattggatcccaaagtatgaaaattttactgagcaaaatcccctagctgtgtattatatccagtgaaataaaactttgaaaggtgaaaaaaaaaaaaaaaaaaaa

SEQ ID NO: 272 - DNA, 2793 bp, Rattus norvegicus (Norway rat)
acagccgagaatgggagtagggcggagtgtttgagcagcacacccatttcctctccgctcttcgtctcgttctcgtggcctgtccacccatccatcatctgccggccaccgctctgaacaccttccaccatggccacctcagcaagttcccacttgaacaaaggcatcaagcagatgtacatgaacctgccccagggcgagaagatccaactcatgtatatctgggttgatggtaccggggaagggctacgctgcaagacccgtactctggactgtgaccccaagtgtgtagaagagttacccgagtggaactttgatggttctagtacgtttcagtctgaaggctccaacagcgacatgtacctccatcctgtggccatgtttcgagaccccttccgcagagaccccaacaagctggtgttctgcgaagtattcaagtataaccggaagcccgcagagaccaacctgaggcacagctgtaagcgtataatggacatggtgagcagccagcgcccctggtttggaatggaacaggagtatactctcatgggaacagacggccaccctttcggctggccttctaatggcttccctggaccccaaggaccctattactgcggtgtgggagctgacaaggcttatggccgagatatcgtggaggctcactaccgggcctgcttgtatgctggaatcaagatcacagggacaaatgccgaggttatgcctgcccagtgggaattccagataggaccctgcgaagggatccgcatgggagatcatctctgggtagcccgttttatcttgcatcgggtatgcgaagactttggggtgatagcaacctttgaccccaagcccattccagggaactggaatggggcaggctgccacaccaactttagcaccaaggccatgcgggaggagaatggtctgaggtgcattgaggaggccattgataaactgagcaagaggcaccagtaccacatccgtgcctacgaccccaaggggggcctggacaacgcccgccgtctgactggattccacgaaacctccaacatcaacgacttttccgctggcgttgccaaccgcagcgccagtatccgcattccccggattgtcggccaggagaagaagggttactttgaagaccgtcggccttctgccaattgcgacccctatgcggtgacggaagccatcgtccgcacgtgtctcctcaacgaaactggcgacgagcccttccaatacaagaactaagcggactcgacttccagtgatcttgagcccttcctagttcaccccactcccaactgttccctctcccactggtccccactgtaactcaaaaggatggaataccaaggtctttttattccttgcgcccagttaatttttgcctttattggtcagaatagaggggtcaggttcttaatctctacacacccaaccccttctttcctagctagctttccagtgggggaacgggagggggtggggaagggtaacccaccgcttcatctcagcgggaatgcatgtcctgtaggcatagctgtcacaaatcgggtgtacttgtggtgagggaggactggttttttttttccttcaggataattgaaagggcaggcccaacagcttagattaacattttctctgtcagtagagagctgttatttcttccggtgaaaccagctttctattgaagtctggtgaggagttggaggttggtctcttggcttccttagcttagggaaggggagttcaccctcccttcatgaaacacagttcacctgacaaatggccctactgtaaaggaagaaaaaagtttcttggtcctccatttataactcaaagcagagtagtatttttatatttaaatgttaaaaacaaaaaagttatatatatgggtgtgtggatatatatgtcttttctaattgagaaaaccatcctattccctgggtgccaagtttgagtgaggagctcggtgtagaagtgaggcactcttgaggtaggggtggggatgcagtactgggaaagttggttatcttgggggttcagcttcattactacttagggtttccctgcccactctgcaggagcagatgttggacaggtagccagtgggatgccactgcttgccgccactgtccctgggcttagtttaaggggacgtgtatacctaatccacacacgagttagaagtatgagttggctggtcaacttgaacattgttacaggcgggtgggtgttagtggggggttattttttggtgggactagcatgtcactaaagcgggccttttgatatattaaattttttaaagcaaaacaagtttagattttaatcaagttcgtagggtttctaactttacagaattgcctgtttgtttcaatgactccttccacttggctcttaggggaactgaggacaggcctggagttaatacacttgtcattctgtgtcctagtgtcctcttcctccggcagactgtccccttccttctgaaaaagccgatagagtcttgttttatttttcttttataataaacacaccccacctccatcccagcttgttgccttgcagttttctggatgtttgtgtcggcagcaggcagctgtggtttttttctcttgccacgatgactctaattaccatgtatagtatgttcagttagataactcactgtaaacagactgtaactgagagcagagcttgtaaatcaacctaacgtttataagatttcctctgacttgtttctttgtggttccaaaaaaaaaaaaaaaaaaaaaaacctcaaaaact

SEQ ID NO: 273 - DNA, 160 bp, Rattus norvegicus (rat)
tctaactttacagaattgcctgtttgtttcaatgactccttccacttggctcttaggggaactgaggacaggcctggagttaatacacttgtcattctgtgtcctagtgtcctcttcctccggcagactgtccccttccttctgaaaaagccgatagagt

SEQ ID NO: 274 - DNA, 507 bp, Rattus norvegicus (Norway rat)
tttagatttatttgtttactttgagtgttttgcctacctgtatgtatgcaccatgtgggtgctgggagtcaaacgcagagctctgggaaagcagcaagtattccagactgctaagccgtctctcccacccctcataattaattctcaacaggcagttgccaaacaaatagaaagaagctattaaaactcctgtttcttttgtagcgtgctcttcaggatcccaatgttgctgctttcatggtggagcccatccagggtgaagcgggtgttatcgttccagatccaggatacctgacgggagttcgagaactttgcacccggcaccaggttgtcccactcactttgcagtgacgccaggctcgcctgcacttgtttggactctgctgacaggctagatgatggattccaaggcttgaggaacatgctaatgcttgcaccttctgaggaacacgctaatgcttgcaccctctgaggaacatgctaaatgcttgcaccttctgaggaaca

SEQ ID NO: 275 - DNA, 2059 bp, Rattus norvegicus (Norway rat)
ggcaggagaagtgatctgttatctcacctggcacatgaagcccattcctggaactatgcaaagggcagagtctggtgagccatggcggcggcagtggcggcagcagcagcagtgcggtcccggatcctgcaggtttcttctaaagtaaactccacatggtatccagcatcttctttctcttcatcatcagtgccaactgtaaagctcttcattgatgggaaattcgttgaatccaaaagtgacaaatggattgacatccacaacccagccaccaatgaggttgttggtcgggttcctcagtccaccaaagctgaaatggaggcagccgtagccgcctgcaaacgcgctttccctgcgtgggcagacacatctattttaagccggcagcaggtcctgcttcgttatcagcaactcattaaagaaaacctgaaagaaatcgccaggttaatcacattggaacaagggaagactctggctgatgctgaaggagatgtgttccgaggccttcaggtggttgagcatgcctgcagtgtgacgtccctcatgctgggagagaccatgccatctattaccaaagacatggacctttattcctaccgcctgcctctgggagtgtgtgcaggcatcgcaccatttaattttcctgccatgatccccctttggatgtttcccatggctatggtctgtggaaatactttcctaatgaaaccatcagagcgagtacctggagcaaccatgcttcttgctaagttgcttcaggattctggtgccccggacggaacactgaacatcatccatggacaacatgaagctgtaaattttatttgcgatcatccagacatcaaggcaatcagctttgtgggatccaaccaggcgggagagtacatcttcgaaagagggtcaagaaatggcaagagggttcaagccaatatgggagccaagaaccatggggtagtcatgccagatgccaataaggaaaataccctcaaccagctggttggggcagcatttggagctgctgggcagcgctgcatggctctttcaacagccgtccttgtgggagaagctaagaagtggctgccagaactggtagagcgtgccaagaatctccgcgtcaatgcaggagatcagcctggagctgatcttggtcccctgatcaccccccaggccaaagagagagtctgcaatctgattgatagtggagcaaaagagggggcttccatccttctggatgggcggaaaattaaagttaagggctacgaaaacggtaactttgttggaccaaccatcatctccaatgttaagccaagtatgacttgttacaaagaggagatttttggtccagttcttgtggtcttagagacagaaaccctggatgaagccatcaagattgttaatgacaacccatatggaaacgggactgctatctttaccaccaacggagccatagctcggaaatacgctcacatggtggatgtgggacaggtgggcgtgaatgtccccattccagtgcctttgccaatgttttccttcaccggctctcgatcttccttcaggggagacaccaatttctatggcaaacagggcatccagttttacactcagttaaagactatcacatctcagtggaaggaagaagatgctactctttcctcacctgcagtggtcatgcctaccatggggcgttagaacgttcaagactccatccagcctgagtaacttcccactgtccttggcaatcttcgtctgccatctttgctcaaaacagatccatgaggatggagtatattgcaatgaaattctttctcagaactcgcaatcccttcaaagttatagggagtacaggataacaccaacgccaggccttcacttgttctccatacttctctacggtttttgaggttaactgttgttaagcgtgaagtgtttgcctagaataagagcttagaactgtcttctaacaattcttttctgatgacttggagggacaacgtaggggcccggtccttggcaatcttcgtctgccatctttgctcaaaaacagtccatgaggatggag

SEQ ID NO: 276 - DNA, 1405 bp, Rattus norvegicus (Norway rat)
gaattcccagggcaagctccaggctccgcaagacccgcgggcctccaggatgcagacaccgcacaaggagcacctgtataagctgctggtaatcggcgacctaggtgtaggcaagaccagcatcatcaagcgctacgtgcaccaaaacttctcctcccactaccgggccaccattggtgtggacttcgcgctgaaggtgctccactgggacccagagacggtggtgcgcctgcagctctgggacatcgcaggtcaagaaagatttggtaacatgacaagagtctattaccgagaagctatgggagcatttattgtttttgatgtcaccagaccagccacatttgaagcagtggcaaaatggaaaaatgatttggactcaaagttaactctccctaatggtaagccagtatcagtggttttgttggccaacaaatgtgaccaagggaaggatgtgcttgtgaacaatggactcaagatggaccagttctgcaaggagcatggtttcgtaggatggtttgaaacatcagccaaggaaaatataaacattgatgaagcgtcaagatgcctggtcaagcacatacttgcaaatgagtgcgacttcatagagtctatagaaccggacattgtgaagccccacctcacatcacccaaggttgtcagctgctctggctgtgccaaatcctagaaggcacctctgctggcatatgacagaaagaacccgtggccctcatgaatcgtgcttcagtttttccttatccattttgggtaagcatcaggatagggaagcacacgtgacaagccaaagataatatgactctatgtttcctgtcaaagaggaacagcaaatgttctttatgtgtttttccccaccgtcagcacagtgtttacaagcttttaaaatattagtctgttgcaatatgctgttttatcactgagcaaagtcactcagggacacagacagccttggtattcattcctttaaatcaacaaaagcttctggtcttcttgagaaggggactaagagagcaaggcagaggtcaagctaagtgtggggatttatcttgccctggtgcgtctttgttcaggtatcaatttgttcctgggtggtctgataggtctattaaataggaacactattttttccattcatggcagacctaagggttgcctgtgatgtttctcttcagagtcgtgtgcacaggcagcctgggcttttgttgttacttgctgtgccctgaatgctggtttaactggaaactgtatggaaagatctgctccctgtatgtgcctttctttcagctttctctgactcaaactgcgggactgctctgtacatgtaagatatattatatatatttttcacaagtgaaaaataaaacattaaaagtgttctttcccggaattc

SEQ ID NO: 277 - DNA, 707 bp, Rattus norvegicus (Norway rat)
ctttggtgtctgagctcagcaagaggcgctcgggggacgctgagggacagctttaacacccgcacaacacagggtacctggttcccagtccagagctgcttggagggcagagatgtcgcgagcagctaatcgccgcccagggctctccgcaggacaattggccgctgcaactgcatctcctctcctgtcactgctgctgctgctcgcctgctgtgcggacgcttgcagaggtacgccaatatcgcctcaaagattaccaccagaacaagaactacaattgtggaatgagattcctgaagcttgtgcgtcctttctgtctgttgattcccagcctcaggcatctgttgcattgaggaagctttgccgtgtcctgatggagattttccagaagcctcaggagcaaactgagaaagataatgctaagaggttcttatttcattattcaaagacacagaagttgggaaattcaaatgttgtgtcgtctgtcgtgcatccgttgctgcagctcgttcctcaactgcatgagagaagaatgaagagatacaaagtgaatgaataccagggtcctgtagctccaagtgggggattctttttatttaggccacgcaatgggaagaggtcaacaagtttcatttaaaatggatgccaaatgatcttttcattgaaaactctgctatgggatataaaatgtactcacatttgttctc

SEQ ID NO: 278 - DNA, 1662 bp, Rattus norvegicus (Norway rat)
ggccccgctcctcgccctgcctaccgccggcatctaaacacaggtgggagtgggagatcccgacaggtgagccccgcgccccgcagccacaaggatggagttcgtgaagtgtctaggccacccggaggagttctacaacctgctgcgattccgcatgggaggccggcggaatttcatacccaagatggaccggaactcgctcagcaacagcttgaagacttgctataagtatcttgatcagaccagtcgcagcttcgccgcggttatccaggcgctggatggggacatacgtcatgcggtgtgtgtgttttacctgatcctccgagccatggacacagtggaggatgacatggccatcagtgtggagaagaagatcccactgctgcgaaactttcacactttcctctatgagccggagtggcggttcaccgagagcaaggagaagcaccgagtagtgctggaggacttccccacgatctccctggagtttagaaatttggctgagaaatatcaaacagtgatcgctgacatctgtcacaggatgggatgtgggatggcagaatttctaaacaaggatgtaacctccaaacaggactgggacaagtactgtcactatgttgctggactggtgggaatcggcctttctcgcctattctctgcctcagagtttgaagatcccatagttggtgaagacacagagtgtgccaattctatgggtctgtttctgcagaaaacaaatatcattcgtgattatctggaagaccaacaagaaggaagacagttttggcctcaagaggtatggggcaaatatgttaagaagctggaagactttgttaagccagagaacgtagatgtggccgtgaagtgcttgaatgaactcataaccaacgccctacaacacatccctgacgtcatcacctacctgtcaaggctccggaaccaaagtgtgtttaacttctgtgccattccacaggtaatggccattgctacgctggctgcctgttacaataaccatcaggtattcaagggagtagtgaagattcggaaggggcaagcagttaccctcatgatggatgccaccaacatgccagctgtcaaagctatcatataccagtacatagaagagatttatcaccgggtccccaactcagacccgtcagctagcaaggccaagcagctcatctccaacatcaggacgcagagccttcccaattgccagctcatctcccgaagccactactcccccatttacctgtccttcatcatgctcttggctgccctgagctggcagtacttgagcactctgtcccaggtcacagaagactatgtccagagagaacactgactttgtttagctggaagcggaagtccacgtgaagtgggtttttcttcttcccccagctggattttgacttcccttggtttttccttctactctaatctttcggagaactgagtgtgggacctttaggaactctgaagaggaaaggacgccttgccctcagcagcctggtgcttcctggatgtggtccctgcctcttgtagccactggcatcatgttgaccgaagcactggaaaggccacatgtgatcctagtgaacctggctagaatgctgattgaatctatttaatttgaaacagcctttgaatacctatcacagt

SEQ ID NO: 279 - DNA, 311 bp, Rattus norvegicus (rat)
ccccatttacctgtccttcatcatgctcttggctgccctgagctggcagtacttgagcactctgtcccaggtcacagaagactatgtccagagagaacactgactttgtttagctggaagcggaagtccacgtgaagtgggtttttcttcttcccccagctggattttgacttcccttggtttttccttctactctaatctttcggagaactgagtgtgggacctttaggaactctgaagaggaaaggacgccttgccctcagcagcctggtgcttcctggatgtggtccctgcctcttgtagccactggc

SEQ ID NO: 280 - DNA, 1875 bp, Rattus norvegicus (Norway rat)
gaattcgcggccgccgccgggccccagatcccagtgcgcgaggagcccagtcctagacccagcaacctgaggagaggtgcacacacccccaaggacccaggcacccaacctctgccagatgtgggggggtggctacccagaggcatgctcctcacccagctccactgtccctacctgctgctgctgctggtggtgctgtcatgtctgccaaaggcaccctctgcccaggtaatggactttttgtttgagaagtggaagctctatagtgaccagtgccaccacaacctaagcctgctgcccccacctactgagctggtctgcaacagaactttcgacaagtactcctgctggcctgacacccctcccaacaccactgccaacatttcctgcccctggtacctaccttggtaccacaaagtgcagcaccgcctagtgttcaagaggtgtgggcctgatgggcagtgggttcgagggccacgggggcagtcatggcgcgacgcctcccaatgtcagatggatgatgacgagatcgaggtccagaagggggtagccaagatgtatagcagctaccaggtgatgtacactgtgggctacagtctgtccctgggggccttgctcctggcgctggtcatcctgctgggcctcaggaagctgcactgcacccggaactacatccacgggaacctgttcgcgtccttcgtgctcaaggctggctctgtgctggtcattgattggctgctcaagacacgctatagccagaagattggagatgacctcagtgtgagcgtctggctcagtgatggggcggtggctggctgcagagtggccacagtgatcatgcagtacggcatcatagccaactactgctggttgctggtggagggtgtgtacctgtacagcctgctgagcatcaccaccttctcggagaagagcttcttctccctctatctgtgcatcggctggggatctcccctgctgtttgtcatcccctgggtggtggtcaagtgtctgtttgagaatgtccagtgctggaccagcaatgacaatatgggattctggtggatcctgcgtatccctgtactcctggccatactgatcaattttttcatctttgtccgcatcattcatcttcttgtggccaagctgcgtgcccatcagatgcactatgctgattacaagttccggctagccaggtccacgctgaccctcattcctctgctgggagtccacgaagtggtctttgcctttgtgactgatgagcatgcccagggcaccctgcgctccaccaagctcttttttgacctgttcttcagctcctttcagggtctgctggtggctgttctctactgtttcctcaacaaggaggtgcaggcagagctactgcggcgttggaggcgatggcaagaaggcaaagctcttcaggaggaaaggatggccagcagccatggcagccacatggccccagcagggacttgtcatggtgatccctgtgagaaacttcagcttatgagtgcaggcagcagcagtgggactggctgtgagccctctgcgaagacctcattggccagtagtctcccaaggctggctgacagccccacctgaatctccactggactccagccaagttggattcagaaagggcctcacaagacaacccagaaacagatgcctggccaaggctgaagaggcaaagcagcaagacagcagcttgtactatccacactcccctaacctgtcctggccgggtacaggccacattgatggagtaggggctggatatgatggagtagccatgctatgaactatgggtgttcccatgagtgttgccatgttccatgcacacagatatgaccttcagtaaagagctcccgtagg

SEQ ID NO: 281 - DNA, 373 bp, Rattus sp.
  misc_feature (100)..(100): n
  misc_feature (115)..(115): n
  misc_feature (150)..(150): n
  misc_feature (357)..(357): n
cagttgataatgttttactatgacttagaactttttcccccaagaacaaaattatttgcataaaaattcaggtatctgaaagactcaaaaggctattttncactttgttcaagtnctgcttccaggcattaagagtgtcgtacagttgtngccactgctgttttccaaatgtccgatgtgtgctgtgactgacaactacttttctttgtgtctgatcgattttgcagtagaccattttagttcttacagcatcaataacaaatgcttcaacatcatcagctccaatctgtagctcttgctgcattgtatcaaaagaaatctctttgttttccactgccattcccataaaggtgaggngtctcattttcgccat

SEQ ID NO: 282 - DNA, 458 bp, Rattus sp.
ttttgtgacggcaaggtctcactgtgtgacgctggctggcatggaacttgctgtgtgaccaggctggcctctgcctcctaagtgagtggtatatatttgaatcccagctttaaggagactgaggccaaagaatcagaaagtgtctgacgatttcagacagaatgaactttggtcaatgtgggctacaagagactctgaagacaaacaaacgcttctcatgttttgtaatgtgttagccaatgctacctgagcactctggcaacaagagggccatacccagatgccctttgaccttggaccagaaccaggagtcaaaataagccttttccttgtctctcacccaggccagagagttgtgggtttgccacagaaaagggactaatttctttgtatgtgtgtgtgtggcacgcatgtgtgttaggtatattcacatgtgtgttccttattatgtacaccag

SEQ ID NO: 283 - DNA, 681 bp, Rattus sp.
gggatcagagtttctttatgggctataggggccacaaggctggccaggtggcaaggtcaccggtggcccggtcaccgatacaggtagtcagcctggatgttggccgcgatctcggcctcccacttgtcaccattgttgagtagcttctccttgttgtacagcaactcctcatgcgtctcggtggaaaactcaaagttggggccctccacgatagcgtcaacagggcaggcttcctggcagaaaccacagtacatacacttggtcatgtcaatgtcatagcgtgtagtccggcggctgccatctgctcttggctcagcctcaatggtgatggcctgtgcaggacagatggcctcacagagcttgcaggcgatgcaacgctcctccccagtacggtatcggcgcagtgcatgctccccacggaagcgcggactcagtgggcccttctcaaaggggtacttgatggtggccggctcccgaaatgagtacctacggtcatgcccagtctcggaagagtccgtcacatcagaaccgaactgcatgtcatcccagattctagtcaaaaaattcggtgccttcaatcaatactgttcgtacggccatgaagctagaggtttgcaataaaatccgtccaggccggcaaggcgggaaaatcaaccaggggaatctaataacccccgcaat

SEQ ID NO: 284 - DNA, 673 bp, Rattus sp.
ccatcacaataaaagtgacacagctttacaaaaataaatttttattaaaagcagtaaagtctgagcaggaagacagtacaaagaatgtaaacaatgtaaacaccactacattcagctcagcctgatcggatgctgaaagacaagtctaaatgctctagtccctttgctagcaagatacattaattctattttacacagacaacatattctaatttttactagggaaaaatagtttatcgaagtcgatcccaacgccaaatgctggcatcatcgcagacagctatgaggatgctgctatccctgctaaaactggtttgtcgaatagcagcgccacatttatgatgggtcagtgttgtgcatttggctttatgaggatcttctactttcaaatcccaaacatacagtttgacaacctgactgcccaatgcaagcattaggtttactttaaccatatcatcctcaatttggcaggtttcaacaaaaaaggcattttcacaaaactgggaaatacaaaacgcctaacatccttcaaatcaacataatccaagtagtccgggtaaaaaatcgggaatggatttcgggaataaaggccggaagtttgttgggtaaaaccaaaatcctaaccatcaaaatccttggtggtctcaaattagagggtcaacccgggaatatt

SEQ ID NO: 285 - DNA, 709 bp, Rattus sp.
gacttagtgcatcagagtacaggtgtcctacaatggctgcctgagcagcatcttagagcagcattacagggatccttcccgaccgcaccatagttataaaccagggacatgacgacgtacacaacccacacacggcagcagtggggatttacacagtgtaacataacattgggggttagcagggacagctgcatgcagggagggtgggtgctgtggggagccaggtcgagaggtggctgtgttggcttccgtccgtgacagaggcagctctcactgagattctcagacacgagtgagtgagtgaccggggatggtctgagtgtcacagtgggctccatgcaggtagcaggaagcagaggcttgctttagttggaagtggctgtatgtctgtcacaagcatgggtctcttcctggtgctgttgccctcagagctgacatgtatggtactggcatgaaatggggaaacccaacagctgtcagaacacccttacaaagacgtggtgtgcactgacaagtagtgtgaacacgtaaaggcgatgcactggccttacctccacggaaactgacggaaggcacatgcaactgagcagctggacaaaaagtcaacagggaaaaaactcatttctagaactggcaacacccgacaggttgatgcccgacagggactggatgtcaaaaaagggactccaacgcaggaaggcgggaagca

SEQ ID NO: 286 - DNA, 570 bp, Rattus sp.
  misc_feature (499)..(499): n
  misc_feature (536)..(536): n
aaggcggcagctgtttattttgaggtaactgtcacacagtactgttatatggtagaatagtcattatgtaatcttgagagaggttgtctaaggtaggatttggagccttccacacttatcagatgccttctcattagtttcttctagttttgcaattctagatccaaattgtatggcccgtttgggcagaagggcagaggatgagagaccaagttccacagctgcaaggcgtaaaatgagcttctcaccaactccacggggcaaagccaggtctaccttttcccaaactggcagagaattcaggaaagatacaacattttcatccagaaaaggaaatcttgcttcctttccatgatcagcaataactctatcatcacgaccaaggtttctagaagaaatgcgacccaattccattgctatttcctcattcaatccttctaggccaagagactgaaagcgggcacgatgacgggaataacctgccaactgctcatctgcnacaatcccagtgagaatcacctttgcactgctcttgntagactgcacagcatcctcggttcacaacaaaac

SEQ ID NO: 287 - DNA, 418 bp, Rattus norvegicus (rat)
tggcaggttattcccgtcatcgtgcccgctttcagtctcttggcctagaaggattgaatgaggaaatagcaatggaattgggtcgcatttcttctagaaaccttggtcgtgatgatagagttattgctgatcatggaaaggaagcaagatttccttttctggatgaaaatgttgtatctttcctgaattctctgccagtttgggaaaaggtagacctggctttgccccgtggagttggtgagaagctcattttacgccttgcagctgtggaacttggtctctcatcctctgcccttctgcccaaacgggccatacaatttggatctagaattgcaaaactagaagaaactaatgagaaggcatctgataagtgtggaaggctccaaatcctaccttagacaacctctctcaagattac

SEQ ID NO: 288 - DNA, 604 bp, Rattus sp.
cacagcagaagttgtgtgagacaggaggtcacaccctacacacaagagtatggtcagagtctgaggtagcccttcccaccctgatgccaaaccccaagcagtcggacctaagttctttcccccagtcccactttaggtgcacactgacagctattaaagttagtgcggccaaaggacccgggcccctccctaatgcccctgcttcaatgtgtttaccattgttcttcactggccaccatctcccgttctgactttctttttacatgctggatatgtctatcacgttaaggatcagtaacacaccagcaaatattcccctgagagacatccatttaggagcattgccttcagaggccttaaacgtcaaggcactgtgtcagctttgggggaatggagctcctcatatcccaccaccaaccctacacatacacacactctcctacccttgcaaatatgggctaaagagggggagtgatggcatccccgtgacagctaaaacaacttattgttcctcacctatagaaacaagtcagagagggaacataaaagccttcccaggacaaaacgggagaggagatacttagggggctggatcctaagaata

SEQ ID NO: 289 - DNA, 616 bp, Rattus sp.
aaccttatgaagcagtttaattaggttgttaacaattagaacaccagtttgtgagggtacatgccgttcgtcagggagaactgagaccgcaggtagccctggagctgggggacagctttgatctttggcaaaatctgcgagtccacagctttctgatcagcctttcgctgctctgtaatttcgtatttctccttctctgtgtcgaagatctcaccctcctgatgcctgggcttgcgaagtggcttcttcttgaagtaagcatcagtcaggtgtttgggaattttaaccttgctgatatcaacttttgtagaggtggcgatgacaaacttctggtgtgtcctacgcagaggaactctgttgagggcaagaggtccagtcacaagtagcaaggaccttttctttcttcttcttcttctcaacctttgtcttggcagcagagtatttccttttgtacaaggcctttctggaatacatagcagatcgtgaatacctgccgattcctctcaccaggacagggttccggctgcaatggggcttactcttcctcagctttttagccttagaactactctttttgaccgcaccagcgggccgggcccggggggcagtagcatca

SEQ ID NO: 290 - DNA, 581 bp, Rattus sp.
aacataaataaaggctttattgttcagttcggatgaatgacagactggcataagctcgattaattgttccacacatttaagaccccaggatgacagcaaaagctatgcttattggcaatgggcaacagggagggagggggtgggaaggacctgaaggcctctgaagttcaagaaagctatcgggaccgaaaccaacgtcctagaagcaggtccaggatggaaaagggatcatccaaagctgaagatcttggaggatctggatcacttctggaactgtcatgggcttcttgatgggtcactgtggtctctctccggccctcactgtccaccacagtgcggtgttcctccactgtcccatctggcttagtgatcttggtcacagagatgcttttgaaataggatttaggctggggttgaagaagtggacccagaccttcctgggaaacctgggagtcaagatccttgtcctctctggctctagaatggggactcacaggccatgtatcatccaacctatgaaaaggtccctgggacccccaatctggagctggtttggaggattcaggttttgcatgactctc

SEQ ID NO: 291 - DNA, 586 bp, Rattus sp.
cagcttctcagaaagctattttatttggatttcacacacaccaaaagcagagaggagactgtggggctggccctctttgggctggagtctctggctcccctgggcagtcggttcccagcctcccaggcttgtcatcctctgaaggctgagtggggtgtctgccctgcaccacagctcttctccaaagccgaggaaaacccatggggaatacagggtaagaggacctaaggatcatgggatgggagcccacattgaacctcggtgaggtagtctgtcgcctgaggcccacacgggtcctgctgaggtaaaatttgtaagtttatttcagggacgtgggtcaggactcctccttggtccccaggacctgcttccggatgatgtccgtgtactcgcggtccttccccttgctctccttccattttctgtacatcaccgaggcgtccacgttggcaggcgaaaaggtgttgggctcattcagcagggagatcacactcaggaggatggtcctgacattctgcgtggggttccaccgctctgagggtagctccccactctgtgggtcatcaactgggggatggaggatgga

SEQ ID NO: 292 - DNA, 475 bp, Rattus sp.
agtaaagacaattttgttcatacaaaacaacagtttacaacagtctgagtgttgaacacaccatcaaggacatgggaggagctgcagacatctgggccctgccccaggcccagagatgcccaggagcccctcctccaccaacccctgagggagacacccctcctccagcacgaggggcatgggggaccatggcacaaagactcgtccccaactgctccgcctcaatcctggggagcccccacccaggttgagtagttagagggtaaggtggctggtgggcagggacagagtcaagacatctttggtgcgaagactgtcccacccaccagaccccgtgctggaaatcgagaagaccacacgtggtcctgcccttgccaaacggaggttggcaagtaccccatagttcaggggagatgcatgaaatgcaactgcctttctgggtagataaccttcccagggtcacccatgggactgg

SEQ ID NO: 293 - DNA, 523 bp, Rattus sp.
aaaaagtttattgtaaaaaaagtaagccattcacaaaattgaatgatttttagcagtacagctaaaacccaactgcatggcagtgagaagtagtagagtggcccagaataaaggctcttctcttaaggatgttccttttagccaataacttctgtagcatgttttttaaacaaattttatgacagcagttaagcctcatagcagattccttcctaaaaaagcaaacaacatttagaactagccttttgtggggccaattcccatcattaaactagtcccaccccctcccattaacaatccacccaccctcccaccattttggggaaatgtatctaatattactttgagccattgctttaagaaaatgggtcaaaggaaggttaaataaaattaaagggccaaaacatattgtcacaatagaaatgtattcattcccttcaagtaggacttaataggcattaattaaataaaaacaattcatctccagaaaaaccaagtgcagcttaactggactagttttggc

SEQ ID NO: 294 - DNA, 774 bp, Rattus sp.
  misc_feature (497)..(497): n
  misc_feature (499)..(499): n
  misc_feature (546)..(546): n
  misc_feature (550)..(550): n
  misc_feature (643)..(643): n
  misc_feature (681)..(681): n
gctcaataaacattttattagtaatgtgaataaaagcaggagaagaaatttgtaaggatttattgtgtgtgtgtgtgtgtgtgtgtgtgtgtgtgtgtgtgtgtgatttgctcataccacatgtctgtgcttgttgcctgaggaggtcagaaaagggcaatgactaccctggaactggagttatggacagtcataagccaccatgtgggtggtgggaattgaatctgggtcctctgtaagaacaagtgcttgtaactactgaatcatccagcccccaggggaggaaaatttaaaagatgtgggagaacgagtttaaatatttcacccctgatgctcccaatgtatagtttcagagtttgagaagcacacacattacgaagacaattgtttaggaacttttactgagggctgcttagctatgttacgctgtgctgcatgcactagctttccttctactacagtccatgcgtgaagacttttgttgataaggtcaatananaagatattaaaaagacagctttccttttggtgtttctaatcattacnacanaccaaagtgaaaccattctgagaggagcaacatcctcagtgtcctgtctcctgtggggcttcctcagttctccttcggaatcccaggtggtanccactgaagagtcatgcagggcgctggctcctcctctnctcctcttcgcctctgtccccccaacactcaattcttcgttagatgccttccgttgaagggcatttggatttctgttaaaaaagcttgggttt

SEQ ID NO: 295 - DNA, 669 bp, Rattus sp.
  misc_feature (367)..(367): n
  misc_feature (493)..(493): n
  misc_feature (584)..(584): n
  misc_feature (587)..(587): n
  misc_feature (588)..(588): n
gactgcttcatctcccgcttttattgactagtcacagtccacctgatatgggcagttttgcttccctaatagtttagcttgaaaggtaattaccagaactttgctaggtccaacatatatgccccaccctgttcctctccaaccgtttccagggtccctgcagtatggcatgtgactacatgtatgttctgggattggaacatattccagctttccacaatgcttgcaatcactgccacacacacatacagtagaatttgtttgcctctgtgtctatctcctgcattgacagtaatatacaacgttactaattaagacaagctaggtcaaaggtcctcaaggactacataaggagattatcaaacanaacataaactccaagaggactgggggtacagtgcttgcctactatgtacaagcccctggatttactgcctagcacaagtacccaacagtaacagaccacgtcacagggacatttacttcaggtggnaaatgcaggcaataagacccatcgttcagtcatcctgtgctacacagtgagtttgaggctggtctgggctgttgagacaacttctcaagancanngcaaacagacccaagaattcaattaaagaagcagacaatcctcgggagtttaagggaagatggtcttcataccatttctgg

SEQ ID NO: 296 - DNA, 599 bp, Rattus sp.
aaggtgtcatgaacttcctggtagtaccttagttaggtttccatctctgaccaccatggacaaggcaactcttagacaacacttaaatggggctggtttacaggttcagagtttcagtccattatcatcaagatgggaaacatgggcagtactggcactgctgagagttctacatcttgttccaaaggaaaccagaagactgtcttccaggcagctaggagaaggtctcaaagctcacttccacagtgtcgcacttcttccaacaagtccacactactaatagtgccattctctgggccaagcatattcaaacacatgagtcgatgggggccaaacctcttcaaaccactacaagtagaattctcatgaaatatgacttcatgattgctagactctaatacaggatttttcatcttgtcttttactattctcagtataatcaaacactgaaatatttacttatgtgactatataagtcacacacaaaaatgtaaactaacattaattaggaaaattttcaagataaattacttagaaataatttttataatcccaacacttaggaggcaaaaagcaagtaagtgtaacttttttccccc

SEQ ID NO: 297 - DNA, 562 bp, Rattus sp.
caggattataaaaggctacaactgtttaatgggaataacctgggacaagcagggggagctttgatgggcagggttgggcagcacaggactaagaacccaaagcccagatagcccacagctctctctccacagccccgccctgaaggatgccggctgcacccgttccaaggcacacattacagacttgcagcttcccatgggctaacccactatgcctctacatttaaaaatacgctttcatcttctctgtagtggagtctccagtcgtggtccttgtctagcacaggtgtagaactgctttgttgatctctgggtttgtccagtcgctccgaatgtcatccaggtgattatcaaaatctacaagtgtctcataggagcggctgtccaggagcgaagcggagatcctctgagcctccggccaatcttcacagtagtcgtgatgtgggtctcggcaccgccacctgttctcgtgttgctcatacacgtggatcgtgggcgctgcacagtccatcgtgaacttggcgttgtccaccatgatgagtgcagcatcactgaagccctc

SEQ ID NO: 298 - DNA, 596 bp, Rattus sp.
aaagcctcttccttccacactctgccctggtgaagccagccgcccgcacgagcccgtcctccagagtgggccaggacaaggtcatggggaagggcataaggccaaggcctcaaagggccagtgggaaggtgaggacttaggcatagtgggtgcccggtgttagagaatggccccctctgtggtccagctggtcctgcaagcgggcaaactcggccagctcgttgagctcctggaactgtcggtccgtcttatggctgaccagtgagcggtagaagtgaacggcaaagacgataaacaccaggccacaggggaccatgatggcagtggaggcgatggcagccgcctcacccggggtgatgccaccgttgttgctgctgttggcgacgacgacggccggttcggtgggtggcttggtggggcttggctgtcccgcctgcctcttgagcggtaagaacttcacccagcagagcagcacgacttcggccaggaaaagcagcgtcccgatgacggtggagaagcccaagccagctcgatgtggcggtgcatgcgctcgtgcggcgactccttgacggagttgaggttgtggacgttgctca

SEQ ID NO: 299 - DNA, 259 bp, Rattus sp.
gaaaaaaaaatacccaaaccaattgcaagcctggtaatgagtggggccaatcttggacttgatggaaactgttgggaaaacatgcccgtcattgggagagagctgaatggaggtcaattatagaatggataaatagccacggaagccaatttagacattattccaatggatgttctgggtacagtattacctttggtgtcttctcacctgaatgtgggctaagataagtgttctctgaaacatacagccctgcctcgtg

SEQ ID NO: 300 - DNA, 581 bp, Rattus sp.
cctataaaaacaatttatttctgggggcagggagggccagaactttgcaaccagcgcccaccccaccctccagctcctcctttacaaaagaaatttttacagtcaccagtcctgtacagatgctccccacccgccttagtgtacacagctgcctgggtccccctggtccctgtgttcagagcggacctgagccaacaagccagctatccttggagtcggcctagacctgagctcgctttggtactggccactagttggcccctcctaggcctcttcttcttttgggtctgtcctttggcctgtctccctttgcatgactcttcgaagctcgaatgggatacgacaggatgacagccgtgttcagctggctttcgcggtgttgcagtgagagtgtgtgtgtcaccactttcctctcttgctccagtctttgggagtgaagtgcagacacttggagtcaattcgaaggagccgcttgagcatagcccgctcatgccatccacgatgtcttctgacagagtgaggatatactggcccttgtagtaattgatgagattgagatactgcaatgtggaaatgacatc

SEQ ID NO: 301 - DNA, 610 bp, Rattus sp.
tattagaggaaatatctaatggctgtcttatacaaatatcagtttcccaggggcagaacaagatttatctgtgttcgaagttccaggatagatagcaagaggcactgtgctcaaaagtatttgtagtatgaaagggccatcataaatacaaaactgttatcttcggtttctactcacagttgacttaacaattctccgtcccgatgaaaggaaaacagtgtatgaagaatccccaagtagattccaaccgaagccacctggtatttttggagctggtgctcaatgcctcagcttatgcagcacactcagggtatggcagaggcagttaagaaaatgagtcaaatttagcatctcagtactacagtgcgctttgcagaccttcggactatttttcctagccaaagtacaggggaattcagacaagagccaccgctgcagaccactatcccattagtgcaaactctggttcagatactgaagaaacatgttggccaattgaggcaggttctcattgttgggatgcattttagtgtaggaaataaactggcgacggaggcgactcaattctgccaaggtcaagggacgggtaaatcggaggtgctccgtggtg

SEQ ID NO: 302 - DNA, 547 bp, Rattus sp.
tcgggatacacaggcacaggcacctgcgggcgcttcagtcactcgggggactggcgcgccccacagaaccaaggatgggcttttataggattttggggagcagaagcaagcatacagaagcagatgcatggttacagggatataattggtggattctaatatggcaagggtttagcccgggggcaagtttcctagctacctttctgaaacataacggctgactcggccccccaagggttcagcccgggggcaagtttcttagctaccttcttggaacataacgactgactcggccccccaccagggtgtgggacctctcccggggcttttcttcattgtcaggtgctcaaccgaagtcgtcctgttgccaggccttcaaccaaacatatcttgcttggcagccgctgtgtactcagtgttctaacctttccctgaaccagtcatcttaagtacagccttgcaaaatggcgttactgctgctaagctggggtctttcattcccccattttttttgttaactttgagtgaaatctttcactcgacttgg

SEQ ID NO: 303 - DNA, 475 bp, Rattus sp.
agacaacagtatgtagtagttttgaatccactgagatgttgctttcaatttgaaatattgtgtatacatgtatataaaaaataatccaatgtatgactcatctgacagatgtttaagatcaataaagtttttgaacatgcatttaggaagagaggggagaagcccaccccgctaccctgttgttgctggcttatttctgcagtggtctcaatagtggtttttagagggaaccatgtgccttcagtcttcagagttacgataagataccataatcaagacgggaggggaaatggggaatgggcaggtattaatcttaaatacattttgcactctatctggtacaagataaaaacaggttaatggggataggtattaattaggaataaattgcagtcagatcaagacataattgccgaattgagtttttaatagactgcatatatagatgtttagccatactctagatcaactcttt

SEQ ID NO: 304 - DNA, 359 bp, Rattus sp.
acacccagaacataattatcatatattaatagcaatataacagaataaaggcttgtggggacagccagtctttcagacatggatggaaggttggcgttcattgttggtgaggttggttgaaggctgtgccttcagcttctggttaaactgcagtgagtaagcccagggttagttgctgagaatcatgttgcaagcagaaccatcgcacatgctgaaactggcccacgaggttgtgtggaggctcctccttaatacgatctgtggaaatgagcccggtggcttcggaaagaacgctgccagtaacgaaggctccaggaaggcttcggtctcaggagctctgccatgctgaccctcgtgcc

SEQ ID NO: 305 - DNA, 423 bp, Rattus sp.
aaaaaggccttggcggcaggaatatagtgtaaaaatcattggaaaaactaaaaggcatcgatacatatccgaatatactttgtacataaattacattttcctttagtcttttgagttgaggtcctgattcggctctgaggtctaataatcaagggggcctggaagctgcacgtttagtccggaatagtccaccatgtacactggccactgctagagagagggggaggggggatagagggaccacgttaggactccaggtgacacggaggaactcccagaataatcagcgcgcttgctttgagggtgagctcaaacgttaacttagtacgcagacactgaggcctggagagggaaagagatctgtccgaggtcatgcaggtagaacgtggtgattgtccccacctgtgttccaggggctcaatc

SEQ ID NO: 306 - DNA, 555 bp, Rattus norvegicus (Norway rat)
tttttttttttttttttaaaattctgttctttttactcatcagacttacttaaggatcaaatgggatacatattttggatggatgttctggcttgaaaatgattttggattctattctaataacgtctttaatataaaggtatttcccacaaatctttatataaaatcaactctagatagacagatagaagcacaatattggccttgagggttagggccacccaccagtgccctgtatttgtgaaggcccaaaccattcaccacattgaacacgtaaggttaaaataagtcttcctaagacagtggacaacccacaatggttaatcaaaagataactgtatgaactccctcccatcaagctccctggcagaggctgcagggacctcttcagctcttcagtgtatgtagatcttgtcacagatggctccaggaaaatgggtcatgacctgcatccgcagccaccagtagtagtccatgggatggtatcgggtataaggggtggcagcagtcatggcatgggtgacagcgttgatgacggaggacgtatcggtggaa

SEQ ID NO: 307 - DNA, 456 bp, Rattus norvegicus (Norway rat)
tttttttttttttttttccttatgcagagaaccttttttacagagtatcaacggtcctatgagtcctgatgcaatatcttttggagcatccacatgagagtggtaaatcctggtcacacaattgctgtctccctcgccaggacttggctcattggcacgcagcacgtacaaatactgctgtccaggaaacagtttgtcatcggctctttgaaaatcagtggtgttgtcagggtagatggccccctcgttcgccttggtgtaagttaccccatgagcatgaaaagtgtagggcctagaggcaaagttctttacgtgaacagaaactttgtctccaacttcagctttgatgacagggcctaaaagccctatccaggctggtttgtctatagtcttcgtaaaggtgccatctgtgtactcagaataaagggccttcttatactttcttcactcgtgccg

SEQ ID NO: 308 - DNA, 390 bp, Rattus norvegicus (Norway rat)
tttttttttttttttttcacaataccagatcaggatttattcgatgaccacattcagttattcagacatagaacaacagattgcataaatatcaatgttcataaaatatttatcacttttgaaattttaatcccatgggaacatccctggagggagaccggacattttctcctgaaacactttatcaaaggcttcagcttgggatacagtgaagtgattcttccagtccccaacagtgcctttcctcatgaggccaataccagtagaaattgattttttcatcaggaggctataattggacatgtcattttctttcatgacttggcaggcactatacttgaggaccacatccagctcatcgggctctagttttttccccaggaagtcaca

SEQ ID NO: 309 - DNA, 425 bp, Rattus norvegicus (Norway rat)
tttttttttttttttttacacatgcgcgggctttattataaagcacgtttcttgacctggggcctccagctaggatgataggacagcacccagtctcggtttaccaggactcgcaacttatcacaggcgcctgagggctgtccagtaacggagagggaacatagccacttccggaggcgtatggggtaaggtgtgtggaaaactttgaaaactccaaagcaagggccacccctccatggctattgcacgcaccggaaggaactcaacgctgtacgtcagctcttctccctgttaaagggacacagcgatccttttttcctaaggcctcgaaagacttccgcccacacccaatatggcgggcgatgggagcgggtagaattccgggaatgtggagcagatcactgggacggagtggagcctcgtgc

SEQ ID NO: 310 - DNA, 613 bp, Rattus norvegicus (Norway rat)
tttttttttttttttttcacaataccagaacaggatttattcgatgaccacattcagttattcagacatagaacaacagaaacataaatatcaatgttcataaaatatttaaaacttttgaaattttattcccatgggaacatccctggagggaaaccggccattttctcctgaaacactttatcaaaggcttcagcttgggatacagtgaagtgattcttccagtccccaatagtgcctttcctcatgaggccaattccagtaaaaattgattttttcatcaggaggctataattggacatgtcattttctttcatgacttggaaggaactatacttgaggaccaaatccagctcatctggctctaattttttccccaggaagtcacatatcttctttatggttcccattgtatcctttttcatgtcttcatagtacagtaacaagaagttgtcccattctcgcatggacagccaggcacggatgtgctcaaaccatgatccatatagaacatttcctttgaggaaccattcaacataagttcccagtgagtctggcttcttcacaagagttgaattaccccagaaataataaccagaaacaagaacatctc

SEQ ID NO: 311 - DNA, 491 bp, Rattus norvegicus (Norway rat)
tttttttttttttgcttccgctgctgtttattgacattcaggtgggcactatagcaacaggcctggagacgctgcagagtacgaggtggagagtggaacatctgcagggacagcagtggagtgcacgaggagagaggccaaagctgttgggaaagcaagtcagggacagggccaaaagtcatctacatgggaaccctgggcccccagcctctgttcttgcggtctcctgattccaggccagggctgggaattctctggaaaactttctacaggagcaaagaacacagagataatgctgcccttctgtgataaagtcagagggtttccaatcctgcattcctccttcaaccctggctcaagtagggccatgaaaaatagctgggctctattgcatgtttcagaggcattaatttttcctggtgtcccagcccaccagcgccacactatggcccagagtgagcactacaagcgttgctggcctaatggatagg

SEQ ID NO: 312 - DNA, 145 bp, Rattus norvegicus (Norway rat)
tttttttttttttttttctcttccttttcttcagcctgatcaacattgacttccttgtcacgttccttctccacacatagagtcatggggtagccaataaactgggaatgtttcttcacaatttcttttattctcggttcctcca

SEQ ID NO: 313 - DNA, 528 bp, Rattus sp.
acatatacttgtatgtgggcatgtgcacgtgcctgttgaggccagaagaggacactgtatcccctggaactcggttacaggtgagtgctgggaatcaaacttagatcctccacaagagccgtactttcttaattgatgagttaactctccaacccccaagggagaaattcttcacaatctgtcatgcttagagaagacacggtgtaagaaaacgagtcctttacatttctttttaataaaacaaacgtgccacagctccaaaccctggccccacatcagtctttccgaaggggaacagtctcctccctgatgccctctttggtcacgatgcagatcctgagggcgtctccagtgtacacatccctctcggctgcagaaatgaagacgtctttcaccagcctcatggctctgtccagagtcagggggacatgctccacattctgcatatttttgaagccaacctggttgtcgagcagcggctgcagcatggcacttgctgagcctccggctttgaaagagtctctctgc

SEQ ID NO: 314 - DNA, 368 bp, Rattus sp.
aacatttaaatataaaaatactactctgctttgagttataaatggaggaccaagaaacttttttcttcctttacagtagggccatttgtcaggtgaactgtgtttcatgaagggagggtgaactccccttccctaagctaaggaagccaagagaccaacctccaactcctcaccagacttcaatagaaagctggtttcaccggaagaaataacagctctctactgacagagaaaatgttaatctaagctgttgggcctgccctttcaattatcctgaaggaaaaaaaaaaccagtcctccctcaccacaagtacacccgatttgtgacagctatgcctacaggacatgcattcccgctgagatgaagc

SEQ ID NO: 315 - DNA, 537 bp, Rattus norvegicus (Norway rat)
tttttttttttttttttgaacaatgcaaaggcatttattatagaagcactctcagaccacactggaaaggtccactcaggtggatttgggtggagactactctgtccccattcccattcatgcccttcctcatcacctaggcctggagcccccctcccacggcttgcgggctacaaaagaccccacacaggagccttctccaagtagtacacccccatcagtgacagatctctgcatttatagcaagaacagttcccactcctagcaggatcccaaactccatcccaaatgaatacagatctctgctgatggtttcgggggtcaccttgcagggtgaggcagggtgaggcgggtctgcaggaccctggggcgttaggtgaggatgtcttgagcctggtgttctaccagcagctccatgctcttcacatcagtgcaccagagctccagacggtccttcatccccttgatctgctgcaaatccagcactcgaggctgcacccacgtcatgtgaacccgcttgtccacctcgtctatgct

SEQ ID NO: 316 - DNA, 283 bp, Rattus norvegicus (Norway rat)
tttttttttttttttttgcgactttgaaagattgtaatatattctgtggaaaacattcggcagagcaaaagccctccctgggccctcccgcagtatgcaaccagtggaacggtctggaaatctgcagctctggaaaggtccctggctcagtccttgaggaatgcaggcagctatatgggaagaacctgctccaggatggttctggatgagatggggatcctatcagggaagatgacttcaaattcgataacaaggtctccacgtttctcaggtgttttgggga

SEQ ID NO: 317 - DNA, 546 bp, Rattus norvegicus (Norway rat)
  misc_feature (516)..(516): n
tttttttttttttttttaaataaaaagccacaaatttattgtaaatctagaagtaccagaacgtcactcatacagatcagcgatcctgtggtggttttcgtttttgttttccccacccttcccaacattggcacccctgattgttgacagactgaaaaggacacacgttttcctgtctcatgcagtagacgagagcagacccctcagaaaccagttataaatattaaaccatctcgaacattcgtagtacaaaatcgcttgtaaagtgctaaagtcagataacacctgcaaaccgaccctcgagcctagagcatttatttctcgggggcagccccacagagcttgccacatccatctcatttcactcgagtctgctctttcggacagacacgttgtcttccagtcactcgccctcccccaagttttacagattgtcctactagttctatggctgataagatgctgtattaaacgtggcgggtggtgacgcacctcaccacttccgtctcagtgcanagaagagattcaagcttgtgtgtacctgta

SEQ ID NO: 318 - DNA, 371 bp, Rattus norvegicus (Norway rat)
tttttttttttttttttaagagcttagaaaatttatttttttcttgaaatgacacacatgggcagggaggtaggacttggtgtaggttggtggaaaccgtgtcccccagcatcccagttttcctctcagttctttgatgagaggtctcctaaagactgggaggcggagcggagagctcccagttctaagcttggaatctaacttgaagtgcggagggtatggggatgtggtgggagccatgggactttgttctctggtaaaaccaaaaaatcaaaacaacaaaactccgagtcagctcggggatacttaatttgcatattggatgctgggtttcaggaaggatgttgtgtgttggtccttgcctcgtgccg

SEQ ID NO: 319 - DNA, 454 bp, Rattus norvegicus (Norway rat)
tttttttttttttttttaagttttatttaaaaaaccttcggtgcaatattaaaaagcaatacagccaggtggaacagtcgacagacagaaagggaaggagctagaggacccaaggtcctttacctcacctgttccccagaagctgggggtcaagggggagggtctgggggtggtgggacgaggaaaaaccaccaccaggatgaataggtagaacaaaacacatataagatacatctggctgaactgaagaggggtttggggccacaggaagctcccctggtttttgttgttcaaaaatgtcctggtttggggagaaagggtgacccctggcaaatgagccagccaagtcgtccgaccccacactccactgctgtggagaggggtgaactaaggtcacgggtgtgagaaaagggggaaaatggagaagggaatcccctcactggagtctgttagg

SEQ ID NO: 320 - DNA, 97 bp, Rattus norvegicus (rat)
cagcttctggggaacaggtgaggtaaaggaccttgggtcctctagctccttccctttctgtctgtcgactgttccacctggctgtattgctttttaa

SEQ ID NO: 321 - DNA, 477 bp, Rattus norvegicus (Norway rat)
tttttttttttttttttgacaggtacacaattttatttaacagcatttaaagtccacctcagaagagggacaccagagaattctttttttttttcatttaataaatacaaatgaataaaaatactttgttttgtacagagaccgcctctcctctcttcctcccccgcttgcttgccaggaagggctgaggatggcaacatgccctgtggccgctctgcatgggcatctccccacacagaccgcttctcacagagagggcttcatctcagtggcctacaatactatttcggtacaatcccctcctcctgcacctaccaacaccagactcttgcctttcaaacagaccgactcccctgggagaaggaaagcacaggcccccacaggtgcccgcctggagccccatagctggggactcgtgacaccatgggacatgcacgctggccactgacatgtgggcacgggacagaagcagacagt

SEQ ID NO: 322 - DNA, 499 bp, Rattus norvegicus (Norway rat)
tttttttttttttttttgcaagggagggaagagtttatttggctttcaattccagttacagttcatcattttggggaagtcaaggtagacgtttgaagcaagtaccatcctgtctggtcaagcagagaaataaatgcactgaaggcgcttgctgctcactttctaacaacccagaggcacacttgttggaacggccaatcttctgactagaatagctagaatacctaccccaccacctcagcttagaagaggtcactgaatccaatttccattacaggattggtcttgatttgatcaatgggaaaccacaagacaacaagcaagcaggggtgtttgagcgaagagcctgaagttcaaaccagaagccacatccccattccttgaatggatcatattgggggccgtgcataacggtgcatgtctttaattcaagtactcaggaggcacagaaaggtggatctctgggaattgaagccaagctcatctacaaaacgatttt

SEQ ID NO: 323 - DNA, 194 bp, Rattus norvegicus (rat)
atccattcaaggaatggggatgtggcttctggtttgaacttcaggctcttcgctcaaacacccctgcttgcttgttgtcttgtggtttcccattgatcaaatcaagaccaatcctgtaatggaaattggattcagtgacctcttctaagctgaggtggtggggtaggtattctagctattctagtcagaagatt

SEQ ID NO: 324 - DNA, 442 bp, Rattus norvegicus (Norway rat)
tttttttttttttttttgacattccacaaagaaatatttattgagcgcctgccacgtgccaggcaccgtttaccccccaatgagaaaacaaaacggaacaaaaacaggacagaggcagcagaaagaaacaaagggcagttggaaaaaagctaagggaactaagcgcttgaagagctcctggatggccgtgctgtttccgatgaaggtgactgccatcttgaggcctcgcggtgggatgtcacagacagccgtcttgacgttgttggggatccattccacgaagtagctgctattcttattctgcacgttgagcatttgctcatctacctccttcatggacatccgtccacggaagacagccgcaaccgtgaggtaccggccgtggcgtgggtcacaggcggccatcatgttcttggcgtcgaagacctgctgggtgagttca

SEQ ID NO: 325 - DNA, 430 bp, Rattus norvegicus (Norway rat)
tttttttttttttttttagaggaaaaaatgttatttttatttcaataagtggttcaaaacttaatggcatttctgtaggttagtaaatgtggctctaattgcctgtcatttgttagatgaagtatggatcaaccagaagggccgtgtcgcattagcatcacctccagcagtagcagcaaggtcattgtcctcatttaggagcttcaggtagacgccgcgacaaagactctcatactaatagtcatcagaatatggataattagggtgttcagcagctatgttcacaggaaaatacctgaagtttctgttcaggccatctaggacttccatatcctcggaaggcaactgaaattcaaatacctgaatgttctctttcatctccttctgttcataagtttgggccagggcaacaaccccacgctgtacctgg

SEQ ID NO: 326 - DNA, 519 bp, Rattus norvegicus (Norway rat)
ttattttttttttttttggaagtagaaatatttattcagaatataagaacgtttgtaaaatattataaatgtctctgtataaataaatggcgtttttttttttaaacaattctatatcaaataacacaaattagctattttacagcagctaaaaactaaaggcatctggaaacatttaaagctacaagtgaatctaaaactgacaaggtatagtacagtgtgtagtagccactttaaaatgacactttccatacaagcagaacagtactgacagatgcagcagacagatgtgctttaagaacagtgcattcaagcaggattttctaattcaagtggtataaaaaacattttcaattaataaaaaagttaaatttcatgcaaagtaagttaatatgtctaaaagcaaattagaaatagaagtgaacatttgtagttgttgcatcaggaaggtaagtgccccaacaggagcactgcagaagaacgctgcggactctacagaatcccttccacatctcaacc

SEQ ID NO: 327 - DNA, 453 bp, Rattus norvegicus (Norway rat)
tttttttttttttttttggggtgtttccagaagagaaatttaatctaatttacatatttctaggtacattgataaccaaaaggtggccactgaaaaggttaaaagttcaattagctcctggtatctagctggcccaggattgcaaaataaaaagatccacgttccttattctctacacaaaacgcattttttaaaaaagtgaaagatctagggagctatacatagaaagcaacagtgaaaagggggagggtggcaggggtgggggaggagagtcccaccctcactctaccctcccagccctggagcccctgaggctctgacatggcaggaggcaactgtcagctttgagctcttccaagctaggaaggcccctttggggtggggaaggggcacccatcaagaatttccgtggcattgtgggctcactgggagctcccaagccctatgggatac

SEQ ID NO: 328 - DNA, 553 bp, Rattus norvegicus (Norway rat)
tttttttttttttttttccattccagttttattttaaagttttaaaattacaaccacagtaattttttcccggcactagttacacttgtttaaaaagtggggtagggtacccgagtttcctactttattaaaataagaggacaactgtacagagtttttctcccagctcccgaggtgagactaagtactagtcttagatatggatatatacatatacacacatgcacacaatcccgcttctctaaagctacctagcaaattcgaatccacgggagtatatcccacagtccactccctgcctctccccctcctcggctacttagaaaagactcaaaagcttggaggggttttaagtggcagaagagaaaaagaaatcaggtcccccaacttaccaccattggtagggcagcccagggagtttatcctcttctcccccacaaccccccttggccaggtagatggggtatcacctgctcatcaaaggttctgaaacgctcactagggacaagcaacctagttcctgggtcctcacctacccagaactttgccagtt

SEQ ID NO: 329 - DNA, 504 bp, Rattus norvegicus (Norway rat)
tttttttttttttttttatagactaggaaatataatttatttcataaaaattaattttgttacaagaggaatgctaaaggttatttacaagttgtttacagaatgaacgggtggggctgggactatccccagtggatcagaacccacagacacacagccatgttcacagcctgacatccaagctcccacacacccgacctctactagagtcccagaggagtgtgggaacctaaggggcctcgtggagcatcccaggataaaaggacacttaagcccagagaaagcggttatgtgcctgaagtcacacagcatagctacaacttggttcccgggcttcccatttctatgtgcgggctaacagtgaccagcaagagtatgcccacggggatgagcatctttggcaggaggagctgaggacactctatgaggcaccattcacctagatgccaggagcacctcggtctcagtcttagagtcccacttcaggagccactgcggaaaccc

SEQ ID NO: 330 - DNA, 502 bp, Rattus norvegicus (Norway rat)
tttttttttttttttttgtcacacaggcattgtttattcctaagctttacagtgaaagtcaagtttgaaaggatagtttgctaccataataacactggggggtagggtggggtgagatacaacaggtatgagcttgtgttcagaggactgacttaagacttaaagctcttcatctctacaggtgaacatcgatggaggagccattgccttgggacatcctctgggagcatctggctgtaggattctagtgaccttgttacacaccctggagagagtgggtgggactcgtggtgttgcagccctgtgcattgggggtgggatggggatcgcaatgtgtgttcagagagggtgagccaccacccttacagttctcattcaaacactaaacagaaagaacgtgagaccagaggaccaaagtgaggacaggaacccaggtcgacagctcgttgtactttaatgtgagacacccaaggctaagacattacacccaacactgtcataa

SEQ ID NO: 331 - DNA, 569 bp, Rattus norvegicus (Norway rat)
tttttttttttttttttatatataaaatcacatttatttgagactgggactttcgaagcccagtctggcctgatctagtgtccagaagcactgattagcagatgtgttttcctctagctggctacaatggctgcggttcattctattcagatgtcagacaataggcacagctgggttccttattcaaaatctgaaggagtctgggaggaggacaaacacatagatagaatcaagcttaggccaggaaccagaaactacggattgctttgttaaaggccaaggaggcttcaaaagcgaacacagctggagtctcatttcagtctccattttcgcaccacttcagtggaagttccatgaaacagcccgatggttctgaagtgccatcaagtcacttcgagctccagcaacttaggtttccaggacatcttctagaagaactcgatcatcccttccacgttatggggccactcacctggcctcgatgcccacctggactcgaagtagccctgcaccgcgcctgtaccctgatgacgacggatgcagaaaaggtgagggccgccctcgtgccg

SEQ ID NO: 332 - DNA, 559 bp, Rattus norvegicus (Norway rat)
tttttttttttttttttcacacagggttgcttttatttccacatccaacttgagcagaggccctgccacaacctgaacagctgtgaggtgctgggtgcctccagagtttctggcacagtaagtgttgggtgtgcagacttcctgatggccacatgacactggcccacacaggaacagcaagtccatgaatggaaatcccactgagctggaagtggaggctctggaaaccccatgggcagcagcaggagttaaaggagccaccaggaacactgcagtgaggctccaatgcagacagggctgataaaaacccaaacagggcattgtgagagcagaggctcgagtgtccccgctgaggacccggggctgaaggcacagagctgtgtcgggatggaagaaccctgggtgcactcgcagtccagagcacgaaagcacaggtgagaacccagcccgaggctctctgtgaagagtgtggccttggatcttgggcacggcacagtgacacacagtgctgaggtcaatcctgacttcccagaggaatgacctcttcagtgacaaaaaa

SEQ ID NO: 333 - DNA, 176 bp, Rattus norvegicus (rat)
ctccacttccagctcagtgggatttccattcatggacttgctgttcctgtgtgggccagtgtcatgtggccatcaggaagtctgcacacccaacacttactgtgccagaaactctggaggcacccagcacctcacagctgttcaggttgtggcagggcctctgctcaagttggatg

SEQ ID NO: 334 - DNA, 393 bp, Rattus norvegicus (Norway rat)
tttttttttttttttttgcaattcacacttgattttattccatgacactgatttgctgaaaccccctgtttcctgggcagggaagggcagtgggtcgcctggtagaagcggggctgcctgcccaggaggactgggattctctcttctcagggaagcactggccaagcctcagcattccctgccctgacccctaaccttccagttcatttaaaaattgagcaaaagtaaaataaaatgaaaaaaaaataaaaacaaacccctgagttgttaaaaaccaaattaaaaatcccctttggtgtcagaaggtcctattcctaaaagccagcagggtagggcaggcacaagcctggcttgggctagcattcagtcctcaggctcctcatcagactcctt

SEQ ID NO: 335 - DNA, 450 bp, Rattus norvegicus (Norway rat)
tctttttttttttttttctttttggaaaaccaaacatgctttattttattcttcacaatttatttaaacatctcacaggacacaataggtacaattcaattttttttctgcttgtccaagaaacaggacttcttcggaaccacggggaggaacgaaaatgaggctggcaaagaaacgaatgctgaatctagagaggagagaatctggggcaagtgttcttcattcctttagttggggataaggtgaacgagagggccgctaagtcaaattaagaatcccactcactgcacatcactatggaggatcgagtcttctgtaattcttctagctccatccacattctcctagtaggtctgggaagaatagtactagggttattaggaataatagtaatataaatacacctaggaggtctttaattgtataatatggatggaatgggattttgtc

SEQ ID NO: 336 - DNA, 547 bp, Rattus norvegicus (Norway rat)
ttttttttttttttaacaccaagaaaacactttaatcaaactacagaaacaatggttatagtacagaatattcataagcaaaagatacaccatgttttaagtacttacaaagttacaaaccatttgcttccttaacattttctgttttttttttaagttcacaacacaagtatcagatttaccattttgcgctttttttttttgagggaaggggggtgtatttatcatcagctagatgtgctcactgtatgctccattatttatatgcaaggcccgggtgactggaagtgcagttgtcaggcattttaataaactggacagccatttgtttctgcacgacaaggcatctttacacaggagcaatcaggagaaaacaggaaacagccaagcactctgcactgcaacacgccaccttaacagctaaccagcattactcaactgctacacaactgcgcctagtgcacaaaaatacataagagaagagattagaattgtgtcgggtaaacaatcctttaaaaaaaaaataagtcttttcacctgaaaagtc

SEQ ID NO: 337 - DNA, 471 bp, Rattus norvegicus (Norway rat)
cggccgcacgaggacaaccagagcttccagtacgatcatgaggccttcctaggcaaggaggattccaagaccttcgatcagctaagcccggacgagagcaaggagaggctggggaaaattgttgatcgaatcgacagtgatggagacggccttgttactactgaggagctgaaagtttggatcaaacgggtacagaaaagatacatctacgataatgtggctaaagtctggaaggattatgatagggacaaagacgaaaagatctcctgggaagaatacaagcaggccacctatggctactacctgggtaagacaccacagcagagatggcacagtggggagcaaggtcacaggaggctcatcatggctgcctccttcacccaaatgtcacaaccttcaagtgaaacctgttgtgtaacatcctcctccacctactaagaatgtaccaagttgcttcctttgactgacata

SEQ ID NO: 338 - DNA, 404 bp, Rattus norvegicus (Norway rat)
tttttttttttttttttgcttttaaaagattttattacaagcaggaaaccatgcacttccattgcaagccattgtaagcagaaagacagatacacttcaggcaaggtaggcttttattacattggctaatgctcatgttcaagtgaggctctggttcagtctgggctgccacctgccatgcctgtgatgtgggacagccagcacccacggctttgcggcctttcacgctcggatagctggcaacaaggcagtagtaaaaaggagtccaacttgtcagttttgagtagcagctaaggccttcccagcacagaggacaaagggcttgttatacaatgagatgatcatgacattctagtcacttgtaggaactccaccttagtctgggtcctaagttagcccacatc

SEQ ID NO: 339 - DNA, 607 bp, Rattus sp.
ggaacgggtactattatttattataaccagggcactccaccttccctcaggggatagatgaagtatacttgtcatgtaagtcagctacattgtcactggagacacggatccagccatcctcccgcacatggtagaggttgactgctcctccggagtaggcatctctgtaggtggcttggtagatggctcggcgggccaggtcataggcctcctccacttgtaggtcataggagtagcctcgatccatgactccaaacgcatacacggagccagatcccactgagaaggcggttccagagatcctgttcccctcactgtctacatagtagaggcccgggcctctcttatcccagccacagatcatggtgcccatggacagccccatgcctttgtactgatacaccatgttggcaagcagtttggaagccgccgcgaccgagatgcgttccttgttgcgaagctcatagattcgacactgtcgagccaacaaccgctcccagaagctgcaatccgctgcacccccagccatggtgcccagaacgtaagggttgatctctatcactttcttcactgtctgggaagcaatgtaggcacctgccgtggcccg

SEQ ID NO: 340 - DNA, 614 bp, Rattus sp.
aattttatttcttctgctagagaacaggagctggacacacgctgcccaggcacagctaggtgctaacacacgcaggcaccaggccaactcacttaagtttcttcctcttcttcttcttcctcctcttcctcctcatcctcttcgtcctcctcagagctgaaggtgccatcaggcaagctgtagactcggatgacctgcttgttggggtccttgaggatgaggtatttgccctcctccagcttcatgcagatatcaatgacacagcgcaggatgccccaggcattctccacactcaggttgatttggctggcaaactcattgggcttaaactgctgggtgcccaggatgacgtggcgcgaggagtcctttacatggtaccgggacacatacccgagcttcaagtactcagagccagccagcaaagcacagcacgtccatcgcgccaacttgtagctgttgttcttcaactcagtggcgatgacagccccacgctgagagtccagcttctgacgccagtcaacgccattacaatgcctggagtcccattcattgagtgtcttgatgttgatgaaggacacttccccgttggccccagtcatgacgccatcatgttc

SEQ ID NO: 341 - DNA, 421 bp, Rattus sp.
caggaaaaaagcattttattcacatataaccgaagcccctgggtctgctgggggggggggggggctgcagggagtctcagttggcttccgatggtctctcctgagatgtgagcttccagctgtgccctctcaccctctgcgatgaatactcagtagattccataggtgggctcatgactgtccctgtatcggtccagatagcgtaggggctgctggtgggggaagcgcttctgcttggggtggtaagggggtggccgtacaaattcaaacacaggttcccgcatgtctagaagctggtggaaggtgtgggtgaccgagtcatcccagcggcactggaagaaagccagaccagctggagtcatggcttcctggtgtttcttgtacaaatcaacggtgtggaaggtcctctgggccagctggt

SEQ ID NO: 342 - DNA, 243 bp, Rattus norvegicus (rat)
accttccaccagcttctagacatgcgggaacctgtgtttgaatttgtacggccacccccttaccaccccaagcagaagcgcttcccccaccagcagcccctacgctatctggaccgatacagggacagtcatgagcccacctatggaatctactgagtattcatcgcagagggtgagagggcacagctggaagctcacatctcaggagagaccatcggaagccaactgagactccctgcagcc

SEQ ID NO: 343 - DNA, 599 bp, Rattus sp.
gagcgtcccggaagttttattgggttctggttgggtcagggtccccccttcatcatctagcgagccgcgctcagcgcccgttactgggcgcgctcagctgccccatcatgtcggccagcatgcgattgcacagcgcggcgtacggattgagcagcaccaactggcgccgtgcgaacgagctgcccagtctcgccgcctgctcgaagtctctgcgggcatcgtcgtcccgaccctgaaatcgtgccagcagcccgcgctgcacgaagctctggcgggcggcgcgaccccggccgccgctcaacgtcaccgcgcgctccaagtcctctagggcgcctgctacatccccctggagccgcctcgcttgggcacggttgttgtacgcagaggctctctcaggtagcaggctaatggctttgccaaacctctccagggctgtgtggaggtccccagcttctgctgccctcactccctgcaactccagggccttggattgctccaactgtgcttgagggaaaactccatcttcatctccctcctctgtttcttccaggtccaatccaacaacatctccaaagggggtattagggttgaggatggcc

SEQ ID NO: 344 - DNA, 518 bp, Rattus sp.
gaagagctttttagtagctaaatatggcaccacgtgactcagggcaatataaattacagtatgcaaaacacactgactggctgaggtaaagcgcaccgttcctgcctcgtgtccactgtgagggaaattgctcacatgctttaaaaaacatctccatcatatatatatatatgtaaaaaaataatcccctagaaaggccaccagagaggggggctacaacgcccaccctctaccatgtacggagcacccactggagctgggtagtgtagtgtccacccctactgcttgcccagagctctgtgtccaggcaaagatgctggcaatagggttggtactggtgggccggcccttctggtgttctcggtagtggcgggtgactgtcccgtgagcagcctcagcttcaatggtcttcccgtcagggcagaccagcacagatgtcatcaggccaagggagccaaatccttgagccaggatgtcagactgtacatctccgtcatagttcttgcaggcccacacaa

SEQ ID NO: 345 - DNA, 609 bp, Rattus sp.
ggagctcttgcaaggatttatttgctacagaattgctttcataccccagcgagctggactaaggacttctgggtctaaaaggatttaggtcacttcatgttttcaagtgctgtgacattcaaaaagcaattttggtagggcagagatggggtagagtagcaccatttgccatgtggtaagaggcgagaaaaataatcagtaatattaaacgtctaagaatagagaaggaaagaatactttaaagttcccatctggacagtccctgagctgaaatcacatttatgtgtgaagagaaatgtttgggctgtgaccgtgaagtgacagatgctgaccttgggcttggctggtgaaagcttccagacactctgaatgacaggatatacgccactcatctggctgattctggcacgtgtcctaaatgtctcctaaatcccaactctcctggttctctgaaaggcctgtggtcatctgatccccaatacttctttttatttttgagacagggtctctctacatagccctggctgtcctggagctccatgtagatcaggctagcctcgaactcacagagatcctcctgctcctgcttcccaagtgctgcccaatact

SEQ ID NO: 346 - DNA, 686 bp, Rattus sp.
  misc_feature (661)..(661): n
atattttataaatatatttacccccaaaatgtaacacctgccctaaatcaagcaaaactttaatatttaatattaaatattaaatatttaatattctgctgttccgtggctctgtccaatggctttctcacatcaagggaaacagtgaatggtcctgagctaaatgaaagtcaaggatgcttcaggtcttctcagtgactaggaaaagtcttaggacattttctgtgggaatcaagatccccaagtcaagctgcagctcagagacctgcaggctgatgatactcccagaaggctacctccccatcatcactacaagaggccaggagccctgcctccttggggttccaagccacacagttgacatcctgggaatgggcctgacgaagatgggctgtcaaagagaaggtgggctgctgtgggtctgagcctggatcttcctcaaacactcggatggcatcatctccacaagctgtagccagggcccctgtcagctgacaccaagcaacgtcgtagatggtcctggtatggaagcccgacaaagtgcaaacacatttccagctggggtcggagccactgcatgccaccccttgttcattgccaggtagatactggcgccagatgcgcacagttcggtcatcactgcaagatgccagacgctggncgctgggatcaaaggctatgctcca

SEQ ID NO: 347 - DNA, 537 bp, Rattus sp.
aaagagtctctgctgtctacagggagcaccctgcagacaaaattttattctctatagaaacaaagtcactgcccagcacctcccttgtctttatccatagcagaaaaaccagccgctccctctagggggcgacagcagtcctgggggcgaccagtggagatgaagtacttgctggaaggccttggttctggttcccagagacagctgtcgtcctcctcctcctcagactccccctcagactcaggcacgctctcgggaagggcaacggccatctgctggaatctccctgactgggcatcccacatgtatttgatgggcactttgaattcggccatctcatacccaaacagcttcaggacaaggacctgctctggggtcagcacgtcaccctccttgcacacttcatagtcagacagcaggggcaccagacctttcttgagggcagtgggcagtcccagctgcctcagctgtggctccatggaatgagggaactgtttcagcggccctggatccaggctcacagttaaagttgctttg

SEQ ID NO: 348 - DNA, 102 bp, Rattus sp.
agcacaacaaaggagcccttatttattatgtgcaaggccctaggttcaacctccatacccccaaagaccaaaaaaattaaacggatgtgtaatgtacaactg

SEQ ID NO: 349 - DNA, 443 bp, Rattus sp.
caccagttaaatttaagaacctctctcgtctctattaacagataggaagcttcagggaccaggtactttgaggagctttctgagccagtgaaagaaaacaaaatatttcctggaactggtaagcttgctgttttcagagtgtcaacaagcaaacacacacgccacacacgtacctcgtgaaaacaatgccgctctggcccccggccacactgcctgcaggcactgctgcgtgtccttgtcagtgaatgttaatgcagaccactgggagctgaaggcgagggagctccctgagggagtgtaggcagcagccctgccaccagcttctagagatctagatgtgagctgcaatctgcgactccatcttggcctgagcagggctggaaggagcacaacagcacgtaccagtgtatggggaaaagaactgacatggctggctccggctg

SEQ ID NO: 350 - DNA, 476 bp, Rattus sp.
gctgggaaatgaatataaattaagggtttattacaaaataaaaagtgttaagtttctccttgtcagtgattcaagaaaacaaagccagaagccttttgtggagccgaagccaggacctctgtgtgcaggctggtggtcaaaagccaggctcatgagcgggcagacagacactgattaacgacctctagcaggtgggtattctccagggcagctgccactcgctccttatctgcaagttgtttgttcactaagtgggaaaagaagggtggaaaaacagggttaaaacaactcggccaggctgctagccccagtatagattatatttctaccgatgaggttctcttctgacgtctcaggactccaagcctggatcaggatatatttactgcctgtgccataactagcttcttcactaggaatacctgtcacggccagggactgctcattccgtctctgtccctgtgtacttgagaact

SEQ ID NO: 351 - DNA, 421 bp, Rattus sp.
  misc_feature (278)..(278): n
ctctgataaatcaggactaagtttacgagtggtggtgacgcagagaggcatggagagggtgggctgaagtgtcaggggtggggcagtagtgtttcctccctgaccccttcgtcctcttctacaacagactgccacagtccagaataggtgattcctctaccgtgtctgttcaactgaagaaagaaacagtcagttacaacaagacacacaatgggaacacacacacacacacacacacacacacacacacacacacaccaagccggcactcactgtangaggaaatgtcgatctcatcgggcagctcactgatgttgacctcgaaacggtcctgcacgtcattcaagatcttggcatcgttctcgtctgacacaaatgtgatggccaagcccttggtgccaaaccggcccgctctggccac

SEQ ID NO: 352 - DNA, 487 bp, Rattus sp.
  misc_feature (451)..(451): n
ggaaatccaaactattttttaaaacaaaatattatttaaatattatgaatctctgaagtcatgagacttatctctccaaaagggaaggacccatggtttctattttttatgcagcattttcaaatacacatgtcaatatatatttcataaactactaaaaaataaaaccctttatcctctgaggttattgatgtgtcctaggtctccaacacatctcattaaacagtaagttctattcatcttcatgaatgaggtgggaactagactaaaaaataggattttaatccctgaggtgtcagttaaaatgcagaggttgccaagattttttttttcatttaaaaattagctttaaataattagcatggatcatgctatctcaatcaaaaccacttcctctacacggagtcctttagaaaattacattttctgggttatggtcaacctgatgtcncagctctccagctatgagactttttttttccttttg

SEQ ID NO: 353 - DNA, 482 bp, Rattus sp.
  misc_feature (395)..(395): n
gaaaggcctgaacacaaaggcaagctgggacagcagaaagaaggcaggacattcctcagactgctctgattcctagagtaccaggggaggaggaaaaggaaatccagagtgattgccctggcttgccccagactcggggttccatcctaggccaagcaaggcctcagcgggctgcttgctccgcacgcttgggcctcaggcctccaggagcttccctaggaagcggaggtttagaatcttgatctgctggtcttccaggtccattcggatgatgccatcctcaccatcaatactcagaaggaccccggtagcctctcggtcctcacccagaatcactttcaccttgttgttcttggtgggggtgatgggctccagatgctcactggagatactgnacaacttctcactatctttcaggtacacggagcacatgcctcccgtgacactgcggatgacgcctgtctgccccactatttgtgtgt

SEQ ID NO: 354 - DNA, 476 bp, Rattus sp.
ccaagttcagcagtcgtttattgtgctccaagagcttccaatcccggttcttgcagcctcccttccaaaggcaagcccgagacagagccaggttcacttggcctgggtcctgtaattcttggcaggtctatagtccttatgggagaaccagttggggtgaagttcaggcagcaggtctgggcatacatctgcccatagtccaagtttgcagtgctctcttcacaagatgaagcgtctacagacagctctaaggcactagagatctacaagagttctggggtcgagttactaaccatcggaaccatgatggggtcctgggtgacccctcaggcccctgctcagaaatgcagtgagctcttgcacctgggctagaaacagcaagtagtgcttgagtgtatgctgcagcgttagcaagccaggaactgtagccactgcaaagagtgacaaggaggttctggggacaatttttttttgag

SEQ ID NO: 355 - DNA, 386 bp, Rattus sp.
gaggtataaaaatctgtatttatattacaatgacataatgacacagcacagccccatctgttagacaggtgggatggggtcccattccagtctgcagctcaggtctcataactcacccactgcactggcaccaggccccttgtgtagccccagactctggcacggaacctgccctagaacagcaagctcaaccacctgcaggttagaaatacagaggcagacctagggcccatatggagacaaaacctccgtgtcctctcctgctagacaagctgggtctgcagcaggatggtgggtctggtacatctggaccacctcctacgaaagaggcccaagcctgagcctggagttgcagactctgttatggagcacacgtggctcacatg

SEQ ID NO: 356 - DNA, 587 bp, Rattus sp.
agggtttgctgaaaatggcggtatataggctgaattatcgagaaggggtaaggtagaacggggtttatcgattatagaacaggctcctctaaatggatataaagtaccgccaagtcctttgagttttaagctgtagctagtagttctctggcaaataattttgtaggtttaattattaaggtttagggctaagcatagtggggtatctaatcccagtttgggtcttagctatcgtgcattatataaatgattagaattactttcgttattgggcttaagtcctaacaatgaattttcacatataacttggattttaattctattatgacatttatagttggcacgttttacgccgaaaataattagtttgggttaatcgtatgaccgcggtggctggcacgaaatttaccaaccctgacaggtatagcttagtcaaactttcgttcagtgcctaatatttatcactgctgagtcccgtgggggtgtggctaagcaaggcgtcttgagctatattatgtgcttgatgccctctccttaagttttacgcaaatgtttaagggattttacaccggtttatggatgtttgc

SEQ ID NO: 357 - DNA, 637 bp, Rattus sp.
cggccgccatactttttttttttttttttttttttttttttaaatcatgaacgagttcactttgtttagaaacagtgcttaccacgtcaaagcctcacttatgtgggacataaaaatacaataaaacacacacaaaaaattcagccacaaaatataaagtcagtatgcttgcgaaccgggcctacacatttctggtgtagcacattttcattagtattctatgtaaaaggattcaggttttggtcacagcaatgggaaaaacacagctagaaacagtgtatacactgagttgatttatgtctgcctatcccacataaacacatctgctcttacgatctctagctggacacaaaagtccctcccaagagtcgggctgcgtgaacgtggggctcaagtggagacaggaatgaatctgatggatttggaagatttgggcgagtccttccacatcccagtgctgttcgttgggctccggttgttagaataagaagtctgtcttcggctcatgctatcggagtcatccttggcgaatttctgcgccatgctgtggcagcatgggaaactttggacgcagtcttgcaggagatggccactgaaaaacatgtatatccacgggttgcagcagctgttcaaggaa

SEQ ID NO: 358 - DNA, 499 bp, Rattus sp.
cccacttaaaacggaaacacctttattgacagtataggacagttaaaacgcacgcaaggacaaagatgagaccacagaggtgtaaagttgcagcacaggagttaatattcttcaccctcatcgtctccttcagcactatctgccccaacctcctcataatccttctctagggcagccatatcctcacgggcctcagagaactccccctcctccatgccctcacccacataccagtgcacaaaggcacgcttggcatacatcagatcaaacttgtgatccaggcgagcccaggcctcagcaatggctgtggtgttgctcagcatacacacagctctctgcaccctggccaggtcgccaccaggtaccacagtgggaggctggtaattaatgccaaccttgaagccagtggggcaccagtccacaaactggatggtacgcttggtcttgatggtggcaatggcagcattgacatccttggggaccacatcaccacggtaca

SEQ ID NO: 359 - DNA, 662 bp, Rattus sp.
gatgagaccccaccagctgcacaaagtactcctggcatcaggcaccttcctccttggcaatgcgatctttcttgagcggtcccatgaatgctttcttttcctccatggtctggaagcgaccatgtccgaatttggaggtggtgtcaatgaacttcaggtcaatcttctcaagagcccgacgcttggtctggaccagcaaggacttccggagagtaagcactcgcttcttggttcccaccacacagcctttgagcatgatgaagtcattggtcacctcaccataatggacaaagccacccagtgggttgatgctcttgtcagacaggtcgtagtcagtagatgcattgttcttgatcagcttaccatccttgatgaggtagccttgaccaatcttgtaaatcttcttgttgatctctgttcggtgatggtagcctttctgcccagctcgagccacagagaaggctacacgggcaggatgccaagctccaatacaagcaactttgcgcagacctctgtgggtctttcggggcagcttctttgtatgccaacgactggtcacccctttgtagcctttgccctttgtcacgccgatgacgtcaatcatctcatcttggccaaacacctggttcacagggacctgctgctccagcctctctcgggcc

SEQ ID NO: 360 - DNA, 589 bp, Rattus sp.
gcgaagccacggcccaactttatttacactcattgcaaagcatgactgagggtaaaggacaggtaccaggggatggggggctgggggtcatggagactgtgcgggtgcacggtagggttgcaggagaaaaggaaggcggtggtgaggatggacagcccctctttcagtgtcccccaggctcccaggcgtccgggggcacagagcaggtgaggctgccttcaggatttggacttggacacagccagtccaatgagtccagccaggcccgccacacccagggccatgccaccaacaatggccatgcctaccagtccatctttcttcatggccttgtcaatcaggcgttccagctccttggcctggctgttctggggctcagtctgtaacagtccccgcacatacttcagagccttttcatattccttgagccggtagttgcccacggccaggtacaagacataatcccgctgctcctctttgctacctttgggcagcagctcctccagcatcacgatgcctctacggatgtcgtcattgtatttgcttcgaaccaggcaccaggcgtattcaaactgcgtgctcttggaca

SEQ ID NO: 361 - DNA, 590 bp, Rattus sp.
accctaaaaacactgtcagctttatttaaccttgatatacatttgtacaagcaatttaaaaagactattccacaacgactcagtgggttttacctggtttgaagataatgcagttacaaatgagaggtagaaacaccgtagtaaagacctaaaaatacaaacatcctatacataaacgttcaaattaactgctagaatttcatacagataaataatgtaaaaattacattactttgttcaccaagtaaatgaaaaccattttctctgttaactttaatcagcacactaaagtaagtgtggtgccaaagagcttctgtgcagctatcagagcgcaggtcattatgtcaaagttttgaagtaaaaagattaaaaccggtgaatggtttattcaagtattaaagcaggtaagtaaaagaaaccaaataatatacaacatagaaaccattcttggggagatgttgatctgccatgaccagctatttgtgaactcagggttaacactgagaagtacacattagtctggagagagctgcccatttttctaagggaaaacaaacctcatttcttactattttatgtagaaactccac

SEQ ID NO: 362 - DNA, 539 bp, Rattus sp.
aacaaacttttcttaaaaaaatggagggcaggccagggccgtctgcggtgtcgctcaacatggcctccggcgaatcgccgcgggcggtcgtcgggggctcaagtgagtggaggggtcagtggtggagaccccgttcctacgcctcgcgtccttaaaacaggacgggatggtcgccgcgtgggggtcgggggtagtcgctaaccactgagctcctctgccgcccttgccttcttcttctttttcttccttgtggcgtcgccgtccccgtcctccgcagcctcctccccgccgtccgccttctcctttttcttcttcttctccttcttcacccggggcgtggtagtgggcgtcgcctcgtcggcgtcgctgtcgctatcgcgtttccttttcacgatgctggcggcgtccgcggtgaccccagggcccggcgtggcttcggcggccgtcgctttcttgctggagtcactgtagtccacgtagtcgcgcgtccaggaggcgggggtgccgtccgtgggtcggccatgtttgtccaggaggcc

SEQ ID NO: 363 - DNA, 193 bp, Rattus norvegicus (rat)
gcctcctggacaaacatggccgacccacggacggcacccccgcctcctggacgcgcgactacgtggactacagtgactccagcaagaaagcgacggccgccgaagccacgccgggccctggggtcaccgcggacgccgccagcatcgtgaaaaggaaacgcgatagcgacagcgacgccgacgaggcgacgcc

SEQ ID NO: 364 - DNA, 512 bp, Rattus sp.
  misc_feature (448)..(448): n
attagccaaagcacatactttattagctcctgaactctagttctccttctcctgtacagttttggttccacgtagccgtccagtccggcgagcagcaatgagacccactttgcgcccagctggggcatctcttcggatagtggaaggcttgccaatgtgctggtggttaccaccgccaaagggatgctccacaggattcatggcaacaccccgcacacgtggccagcagttcctctttgccttgtacttatggtaggcacggccagcctttaagataggcttgtcaattctgcccccgccagccacgacaccaacaacagctcggttagcagaggaaatgaccttcttggaccctgaaggcagcttcactcgggtcttcttggtctctgggttgtgggagatgactgtagcatagttcccggaggctcgtgccagcttgcccctgtcnccaggcttctcctccagacaacacacgatagtaccctcaggcatggtgcccacgggcaaaacat

SEQ ID NO: 365 - DNA, 658 bp, Rattus sp.
acaaacactttttattttgtttttaatttagaacatgatacatattcacaagatttacactttatatcataccaaagcaatctagaaacactgtacagagcacacttgaacatttagaaggctatatataatctgtggtaaagtcataggcatcgtcttcttcactcattttatccaagataaaggatctgtcagatggtttacttgctgttgattgcccaggtgacatctccctggtctcttctacaggagtcacatctgagatctctgcatttttttcaccagtaacatgttcttgatcatcaccatcctgttggtcttctgtctgttttggtgactcttcggggatgtccttttcttctagtattccatttgtcaggcccgaagaccggaaaaggattttattagttaaatgagggcccttgaggacttgtatgctgtgtgcattattcttttctagttcttctagattaaagcccctcttcatgattgctgtaatattctcattaaaatgaggagaatgattccaggatgcagggggatggcagtagtaacctaatgaggcacctgtccactcagaccatagcagcttagcagcactttcgacatttgggcttccacctttttggtgcagacctcttctctgagcaagtttagt

SEQ ID NO: 366 - DNA, 322 bp, Rattus norvegicus (rat)
tttccggtcttcgggcctgacaaatggaatactagaagaaaaggacatccccgaagagtcaccaaaacagacagaagaccaacaggatggtgatgatcaagaacatgttactggtgaaaaaaatgcagagatctcagatgtgactcctgtagaagagaccagggagatgtcacctgggcaatcaacagcaagtaaaccatctgacagatcctttatcttggataaaatgagtgaagaagacgatgcctatgactttaccacagattatatatagccttctaaatgttcaagtgtgctctgtacagtgtttctagattgcttt

SEQ ID NO: 367 - DNA, 476 bp, Rattus sp.
aaagacattttatgtgaaaacaaaaggtgcgaggtcctgtcggccctgtcagctccgcaagtcagtttgtgtgcaaatggggctggccacagtggcagggagggccggcagagtgggtgagtctatggagttgtgcaacaaggaggtggctcaatctccctcacaagggagactggctgtacggggtagggcaaggttcagtacaaggtcaagttcccactacacaaatgctttcatgggtggcctccagccccataaggattcccagcagagagaccactccagcactgcctgactgaaagctacccagggatggaggcatctttgatactgggaagattctcaatgccaaggacacacatctgtgctcctggaaacatggtcttacagcccagaaggatcttagaccagtgcctctggactgcagtctgttcctctatccacagtttgcctcttccctggggtctgaattgagc

SEQ ID NO: 368 - DNA, 451 bp, Rattus sp.
aaaaacaaggcactgctctctatttaaagtaaacctattgagcgacagccgtggcacagaatatgttcaagatggggcgtgaaccccagggctcccgcatggagcccagtactgtagatgccagcagaaggaccagtctctgatggactcagaactggataaaccacactgggcgtttcccagttaagtgtttgccagtgtgtggccaggcctattacagctactgagcaaacgggttggcatgaatagttatgtccttaatgtgcacatcattaagaggtctgtaagtcttctcatttactggtaacttctccaattcatccaaagtctccagaccatctattacctttccgaacactgtatatttcatgtccaagtgtggctgcttgccatacgtgatgaagaactgagatccgttggtgtttgggccattattagccatagatacaac

SEQ ID NO: 369 - DNA, 409 bp, Rattus sp.
ccgtgtcagaaactgtttaatgttagaattacaggcttttggcaagtatatggcaagcccatctgtccgttcccatgtccactgagaacacagcagagggggcatgccccaagctctggcctcagtccagacttcagcttgggtttgtccagcgagatgtctccagtccatgaaagcccatctggctacagcttgagttcactgggcattggctcccctcttaggccagctgagcaataggcacaaactctgcctgaaactctgctgcttcctgaggcctgggctggcgccccgtgtagagaaatctctggacaccaaatggtttcagtcgtcgagcaatggcctgggcgagcgcagccctgccctgggccggcaaagggccagtgacgaacaccttcatcctcgtgcc

SEQ ID NO: 370 - DNA, 409 bp, Rattus sp.; identical to SEQ ID NO: 369

SEQ ID NO: 371 - DNA, 626 bp, Rattus sp.
actcataggtaggaatcccctttattccttatcaaaacagtttaacagcaaatgtagataatatatgttttatttagacatataagttatcttccatgggggcattctatcttgccccttctaatgaaagagggcaaatttttatattaatcttattcaaagactagaccaacttaacagtaacagacaaagagagcagagcatctagggtagggagtagaaaaattctactcataagcacatttaaacttcttaccagtacagagacacctgctgccacatcagcattactcctgactagtaagtctcccagtacacgtcaggggaagtcccaacacgtattttaaataaatttcactgacttgacattcaacgtctagattagatattcaaagtcttctttattgcaaatatgatgtctttgacctgaggtatggagttgtcttctagaatctttgcgtaaggcatagggacatcagcaccagtgactcgaacagcaggcgcatcaaggaagttgaatgcagggccttccataattctcgcacaaatctcagctcctactccaaattgtggccagcctccttccacagttacgagatgatttgtcttcatgacactggcttcta

SEQ ID NO: 372 - DNA, 118 bp, Rattus norvegicus (rat)
gtccctatgccttacgcaaagattctagaagacaactccatacctcaggtcaaagacatcatatttgcaataaagaagactttgaatatctaatctagacgttgaatgtcaagtcagt

SEQ ID NO: 373 - DNA, 635 bp, Rattus sp.
ccgggtaatcaaaaaggttttaatgattaatgtttagacattatttgacagtgtgggtatatccagatgagctaagcacactttgacagcacactactgaatgttatagttttgtactaagatatgtaaagaacctgcgagcggtaccctcggatggagacacacatggacgctctagattagagaagatcaatgtaaacagacgctgcaactccgtccaaacagaggctaatgaggaccaactggctccttagaatatgaatgtgcaaaattaaagcatggtaaactggtatttacataaatatcaaacccacaattagtttgtacattgtcaattgtcttctaggatgtgtcacgagtggttcaatcaattttcttcaatgcagaaggtgttcaaaggctaaactttcaacactttaaagatgacacatgtaacaatagtccccacttgtatgaccaacgtctccagcgcactatctgttacttttaaacaagcgctttaaatcaatctttagatgctaagcagaaaaaaattacagatgccaccgagatttacactgaataaagcgattgctccccaaacacccagttcctgcgtgctccagctctttaattttgcctcaaaatgattacgg

SEQ ID NO: 374 - DNA, 532 bp, Rattus sp.
ccacaaactttattgtagagtctgaatactagaaagagtcttcagtccgttggctgtcacttccctctcaccctcatctcttctcagccttggtggttttgaccgcaatggctgggcttcaggacactggagcttgtcacagtccagctctgattgctctaactcctgtaatcccaggaaccactctttccctgagcctgagtaaaggattctgagttctccatatttgtccatctttccccttcccaccctgacgaccccttcaggtttctaggcctcagctacaacttccttgggaggttcctcatctggtggggcctcctcaggtgctggcttgtgggcaagccctccctgtagccatgcagtttgcagtatgtctttcagcccactacacaggatggtgaggccaccggctattgccagtagccaggagaggagccaggtctcctgtgccaaacggctacggggttggaggggcagcaccacgggtagcaccggcgccatctcccatctctgcccaagggattgagga

SEQ ID NO: 375 - DNA, 515 bp, Rattus sp.
caacattaaaatagatttattaattactggtgaaaaacatgatatattataaccaagtcatatactttattgaaaagaaaaaaatattcggtaagaagtttggcacggtcttctgctgggacctgtgtgaaatcccaggacttgtaggtcggggctgccttcgtgaggggtgtcaatgcagcccaagaagtgggtaaagtaggaagtgggggtcaaagaaaggcaatcaagaggtctgctcacaggggccttttcccacgttcatgcactgtcaggctgtatcctgggacagcggggagcctcggagagttaatgagaaacagaattgtcactttggcgaccaatgtcagaaaacaggttcctggtcaagcgttaggtactagcgaattctgaccctgagacttgaggtgtcactgtctttaaactgccaggcatggagggaagtgtccaaagatgggacttatagagagaagtggtcccggcttcctgtagtctccatctcaccagccccaggc

SEQ ID NO: 376 - DNA, 441 bp, Rattus sp.
cgaagaaagaaccaaaagtgtctactgtataaatacaaaaggccaaaaccgtattaacataaggtaatgaactaacagagactgtccattagagtgcggaggcctatgccttcccagctgacgccaggtacttgaccaggaagtctctcagcctggatatgtgcatcatctccttcatcgtggtgtctcggcttcgaagctggatcagcccactttccaaggtggtttcagtgattagaaccgtgaagaggatactcatctcatcgtactttgaatagagttgctctaatgaggactgtgcagtttccaaataaccaggccacacagcaatcccattttctagtaactcattgagtagcccttggcaaacctgtcggagttccacggttgggcctttccccacatctagagccaccttaataggggctaaacaagggtgaa

SEQ ID NO: 377 - DNA, 472 bp, Rattus sp.
caaagttgtgaacaacgtcaagaacacatttggctacttaattactattttaaggatggcgtgcagattcatagagtcagcattgtggttttcggggggagtataaagattctgcctctactttcctttacagtaaaactgtgacaaattaatgaaacaattatacccgctctaattgtatacggtggttcctggcctcttttgttctacaccccaccggctattgtatacatagtgagttttaagcttataaaaaatgtagtagaaattgctgttgtctaaataggtaaaactattcctttagtagcttgaaatattactacgtggttgaatacaaacctttctttagtactactttagtaacacttaaacatacacaaagtttaaggaacaagcttgtaaccagtaagtctatgtaaaattctgcattgcagactaaatacagcggatggcgtatagacatcagagaaaa

SEQ ID NO: 378 - DNA, 367 bp, Rattus sp.
acagtgacaagaaggcttacaaaggagaaggaagaagaacacattggacacctgagattgacaagggtcatttttggtccaagtgctgttaacatttttgagggagttttaaggcatttgggtctcagggtttgttagcttgccctattgccttcttagccagcagttctgagcaactctcaagctttgttaccatctgaggtgcatcttctttctgtgtacttctatttctaactcattgttatgctgttactctctggtctcccatgtagagtactcaggaggattttcttgatctttccgctccattgagaacatctttaattgtatgaaacatcgcaggttgtctttatctacagagtaaagg

SEQ ID NO: 379 - DNA, 597 bp, Rattus sp.
catagtcaacaatgtgttttactatacatctcagatttatacatttcatatatgcttttaaagcttcaattaacagatcaatacaaaataaaatatatatatatttatatatgtgcagcagtggttctcaggcacaggatttaggaggaggatggagggagtctttccttggcatgtcaaccatgatagtggaacgtgtccttctgacttagctgccttgattgaactttacatggcaaacagttgaacatgtatgccattgctcattggaaggataagatttgaagtaagttcatagcctgcatgttttgaagtctttaagacttaaatgcttgctttcctcctacgagctccaagatcatcctatgaaaaaaatatgtccacaaactgtctggaacacctgcctaagaaccactgcctatggttattcaatgtcctcaggcctcacaggatgaggtaatgggatgatggatttcttctcagtgtccctggaaagtgctttcctcatatcgtaggcatcctcatcaggctccccattgctggctgagtagtactctatgactgtcctgtagacactataacccaactgcttgtaca

SEQ ID NO: 380 - DNA, 645 bp, Rattus sp.
gagacagaatataaaatgtttttatttcaaaatgcaaaatgatattcgttgtaataataataataataataacaacaacaataaaaataacagtataaaaagcatgtctccttccctaatgcaaagtgacagctccttgatcgctcccacagccttggacaaatcacagtgcatgctgcacagcagcaagtcagtcccagatcccttgggtgatctgtgcagggtcagttctggattcggtggcaccttgaaacagcatgtgactctctctcgcccacctcagtcatgatctctctgtgtctcgcttctctgccagtcaccagccttaagaggcatgctgccggagggacagggcccggctgcacaaagtcgcctcctgtgtcttgccttctgctatcagggcctgcttgtggagggactgctgctcacaagcatcccgcagctctgccactgccgcctcctggtcgcgcagacggctggcagctgtgaaagggctgcacacagtctccactagaccgagcaccacaccgaagaacgctagcacactgcccagcacgtacagcttcactagcttccctcgggacttctgcgtcatcatctccttagccagaaggatcagctcctgcacactttccatctgagctc

SEQ ID NO: 381 - DNA, 630 bp, Rattus sp.
aacaaataatgacagctttaatcaatttctttactataaaagacaatttaaagtgtatttttaaatacaatgttagcattgtggtaattttgctatgaaaaggtaattctaccttgtaggaaagagaaaatgcctcaaaaaacgccaagtagtttattcatatgttggaacgggtgagccagtgaaaatcctgggccttccgagtactttgtggttcaatcatgatgttgataagacacggtttacttgtgtctttcagagcctgcctcagcgagtcttggagctcttctggcgtttgtacaaaataccctttgcctccaaatgcagtcatgacctgctcgtagtgtgagtttggaagcagacacattggagggattgttgtagcagttccttgaaaatttaatattttcccccaggtgtcagcatcaaaaccttggtaaattccattattgttcactaccaagattatgattggcaagttgtacctgcagatggtttccacttccatgccggaaaatccaaaggcactgtctccttccacacagatgacccgctgcccagggcttctctccttagccaccacagcagctgcaatggcaaatcccaaaccaactcccattgttccaaagg

SEQ ID NO: 382 - DNA, 643 bp, Rattus sp.
aatgccgtttatccagtctcagaggtagcccttgaagggaagaaacttttgatttgacccttttttctaagatttttgtttcaggacctgaattaagaaaaatcaaaacaaaacaaaacagaaaaattaagagatgattttttctttctcttgaaagtttaagagagattctcagttcatcttttcatgactggaactttctaagacaaaccacaaagccatataccaagcagaaatcagagaacgaagcccagtccccatcagctgcaggtggaaaccacggagaagccagcacagcaagtggctcatggttaatacctcaggtctgttctgagaaaagatgccgatgaactgctctgagcaaggtttgaaacccttctggatcagcgccgagcctatgcactcagccatttctgcaacctgtttgtaagaaatccactcatatggctggtttggctttctagaacctaaacaagggccatcatttgacacctgaatccccctctggaagccatcgtacatcgttctgacatcgtcgtagtagtacagcaagagcttgtcgtcctcaaggactgctgatcttcggacaccctcagtagtacccgttactttcacagactgcatggacagatcacatgggggc

SEQ ID NO: 383 - DNA, 480 bp, Rattus sp.
gggtccaaaggtgatatttcttcacatggaaaaaaactaaattcaagccacacaagaacatgccttgagggaaacagtgatgaagcctgctcggaccacacaggagcagatgcccattcagagcagaggccgcatgaacaaatctttattcggaacagacagacgtttacagccaataagaacacaaaggccatggacaagactgtaagcgcacctgagctttaaggttctggtgaggtcctcacaaaactaacacactccacataccagccgggtaagaagaactcatgtgtcagggccagcgggggcacgaccataagtgagctgtgaatgaccataatgaggacctttgttcacactagctgcttttctaatctaatcaggttaatttcaatacagcaaataaccgataaaaaataaaaggtgccacctggtcagcaacatcatacactggtgacaagagaacgttactgagttgtg

SEQ ID NO: 384 - DNA, 464 bp, Rattus sp.
cactgtacagatatgaactggtcatagctttatttagaataaaaagcctgaaacacacccagtgatctcaataggggatgaaatgccagtcataggggtgaaataatacactgattattaccaaaagataaatacaaaatactcttttggggtataaagaaaaatgaagctttattcaaagaaatactgaaaataaatgttttacaaattgcaatcaagcacttaaagtataatttggtaatgaattctcagaaactatataatacattctgctgttggccaatgcaaagtgtactttaaactagtattttacatatgctcaaccctcaatcatcttaccattcattgattataatgattcaacagtttcttatgtagtatctcagaaaaaaaaattccaaatacaaaacattcatgccagcaaggaagatgtaaagacacatgtaaattacggcaggactctg

SEQ ID NO: 385 - DNA, 431 bp, Rattus sp.
acaaataaaataacatttattctcattaagtgtgtttggttaccagcatttcaacttgtcctggattggtatggattaaacatactcaaataattaattaggaggccattagggctgaggtgactccgggccttgggttcctgtataaacaaatcaaaaccctgcaaactgcaaaacaaaatgtaacccagaatattacaatgcgatccatcttataacctttttcagtttgtaaaagcaccagatctcaagctttatgtcacagcatcccctaagccctagagctttctctgaagaccaactctagcttctgaccccaaacctccatctttcctggggctacttttcctcagccttctcactggtggttcctcactcgcacacccactcctgtctgaggcacatcaggggactaatctttcctgtctctc

SEQ ID NO: 386 - DNA, 502 bp, Rattus sp.
  misc_feature (413)..(413): n
gatggtggcataaattgctttattggagcagctgagctgggctcaggtttctccagtggcctggaagtccatgtcttccaccaagtcctggaggcaggccttgtactggtcagaggtaagggagatcggctggctgttggagatgtgcaagtccacggttttcagtgatgaggctcccccttcccgggccatctctaacagctccttaagacatgtaggaacaaccttgaccatcacaagcctcttgacccacggctggtcctggggccacgattcccccacacagaaccacagagtgtatcgtggggaatgtctgcttccttccatgaaggcaatgagatctgccacaaagggcctgaggtcgaacacgactccgttcttgtccttggggacctctccatcaggccctctcncactgtctggaagcagctcctcacccagggcccacaaggaatgcgagtggcctaagcgctgggcccaagagcactgccctgcccgccac

SEQ ID NO: 387 - DNA, 354 bp, Rattus sp.
aagcatgggctttcagcagggttcagcctaaagtgcagtcccagtaaagtcgggggctgcacgaccattacactttgcgggggttggctcaacttcatcagaagggatgactatgacccacagggaaacaacccatgaagagaagaacacagtgaggaaaacatccaccatcttacaagtcactttgttaccacgggcacgaaatggcagttactgttagtaggtatctgaattaactttctgcataatacaagtaggtcaaagtccagcagcaaaatattgcaacccagcaagtagatacagtttcagggtgttatactgtggaggagagtacacaaaggacaaacaatgata

SEQ ID NO: 388 - DNA, 656 bp, Rattus sp.
gcaaaaacatcctttaataactgttacctctttctcagtgctcccttctcaagtgactttgtcttgagagtggcaacaagggctactcattgctagttatctaaaagtagattgggttggggagaccctgagaagactggggaaaggcttccatccctcaaagtcagatggcaccaaggcttctcaggacacgttcttaggctggattgaccacttggctcatcatcaggctgctccatgtgaacttgtcaaagagcaggaggatgaagggcttgttgaacttgatgtcaagtggttcagagcgcaggtgtaggggagccccgttggtagaattaggcaacacattcccttcatccagttgtagcatggccttgtggaccatcgttaatgtcaagggaacatctttggtgttgcctgagaaatctgattggttggtgagcaagtccttaatgttcaggtcttccagcacgtctttaaggtcataggtatcagacatggagaatttcgggatgtataggttcacctgccttggggtcataagcttgccccacctatcaattgtgtcccgactaagtgcagcgatgacagtgtccatctggccctggtccggaagaatgaagaaggcagttccatttcccacatagtccatctgtatc

SEQ ID NO: 389 - DNA, 537 bp, Rattus sp.
ccgacagtagaatttaataaaaaatactcactggtacaaacccctctagcactaggcccaagctaataagccatgtcctgacacactgccttgggcgggctagcatgtcttccagatggacacgatgttggagtccgtcagagcagtgaggtaggtgaaggctgcattggccacgactgtgtttaccatggtcttggtcactggttggcccaatgctactggctgaggccacttcaggatctgtgttgggggctgcagagttgtttcaagtggaggtggctgcttcagtaggtgttcaacatcgtagatccacacactgccttcctcgtctccacacagcacgaggtttttgtcaggacaggtgctcagtgagaagtaggccaggctggtgggtgaccactgcagctgggccaggatgactacaggcaacaccgactggctgccccggcttgcccatgtctggctccagctccacaggtagatggtgccctgtccactccctttggaggccaccacatcttcgttcacaaatgccag

SEQ ID NO: 390 - DNA, 598 bp, Rattus sp.
gaattagaagaattttaataaaatcatcaagtttacatttgtacatcttgtgggtttgggacccattaagaggcaaaggaagctatgatgacagattcctgtgggagagcaagcaggaagcaagggttgccctagttgtgcaacaggcgccccatgacagtgtgacccatttctctgtgctccagggctgtcgaccacggctcacagagcctctctaaactctgtgctcagacctggtgcccacagcgtaggtgacaggcctggtaggcagaagcagataaacagtcaaactgaacattcctgctcccctccagatgccaatgtgacctgagctcagcctgtgcagttccagctagcatggctacagagcccgaggaaggagctgagcgccagctgttgtgctacccagggacagtcacgagagagcagggctgtgacaaaactatgctgtgttcattttaaaaatgggatttgtgaaatggcccctgggagagtttgaggaaggtaaggaaataagagtttgtaacatgtgaggtggctctccaccttgtagaactgtctgctttaaaggatttggtgggggccggggctgggctgc

SEQ ID NO: 391 - DNA, 323 bp, Rattus sp.
atttaaaatttattgtaatggggtctgcgcaaaaggagggaggggagaaaaaaacaacaacagagaaagaaagcaccaactccccaggaaggggcagcagacagtaggggaggggacaggaggagagcacaggaccttctaaggaaaggctcacaaatccctgggaggaaaggcaagggcttaaaggttgagggcagtggctgctgctgtcctctgccacccctgctcactgtccaggggacttcaacacaactcaggggacaggtgtttgtaaggtcagctctgatatggacaagaaaggagcatgagaaacatcgttaaaa

SEQ ID NO: 392 - DNA, 506 bp, Rattus sp.
aataatacattatatcatcagtagaaaacaaaacgaacaaaacagccattttggaaaataacgtgctaattgcccaataccagggaaagcaggtcccctccctggactctactggcaagcccaggtatgccctgaactctagagtctccatcttgtatggatgatgaagcattcaagtaaacggtgaggcattctgggtgtgagtttctgagaggtaccacctcagaggagactccagaacagccgcagccctccagttcatccgtggtatcgcgtggtcttgggattaaccagcagttttcttctgaggaactgtgataattgtcagcctcaggatttagtggttataaaacaacttccatattaaaaaacacttgagacacacgaacatgattctcatcgcttctccaacttcttgtacttggcttctagttgaggaagaacaggaattgtgtctttgaacactagtgctcacaaagatattttttagttagattttcaagcaa

SEQ ID NO: 393 - DNA, 492 bp, Rattus sp.
aataaggtgttctgaggaaccaggaaattaacagagaggggcgaataagtaatgcttcttaagccctgctcagtatttcgtcagtcatcttctggtaactggatcttgctgggatcaaaatagttggattccatgatggggaggccgttgagttctcggtatttcacaagtctctcagcttcccggcgggcccactcttgcatcctagattttgactttattttcaaatgaataattgtccttacctacttgtttgggagtactcgccctgtctgttaagctgcaccagaaagtgctatttataaaggttaaaaaatgtttggatgttggcaatttcctatgggttcacttaatctatagcaccctatacatttaagatcctcaactagaggttaggtacttatatattaggtcttttcaaatacacaaacctcctaatatgcccagtagagaggaaatggcaataataaacaccttataattctgagtatt

SEQ ID NO: 394 - DNA, 443 bp, Rattus sp.
aaatgaactcagaagtgcctagagaccagagggtggtaagagttcttcccaagtccccatccagggatgaagggtgggaaagatggtgtgtgaatcgatccctggggctgcggtgtctgagctccctcctccctaactgcctgcaggtgagctgtgatcagccagcattgctttgctcagtgaatgcagggtccacagaactgaagggtgtgcagggcagcaggcatagcgaggcctgctgggagtcagccccgggctatggcgataggcaatccggtaggcagtccggtagatggttcggtaggtgctacaggctctgtgtccatcacaagtggtgaggtaaggctggtatacacgctgcacaaaggtctctgagatggagcctccggaaacccccacggtacacactctacggctgggtctgtagacatgctcagtagtac

SEQ ID NO: 395 - DNA, 407 bp, Rattus sp.
caattcaaagcaaggtttaatctgtgcacagaacagccaatctggcggccatctccccgtaaagtttgagttctggaactgaagggggtggggttttgcaagcaggaagaacaaggcagttaaggaaatcttctcagaacatctggtacagaacattctttggttatgggatggggtacagctaaattctgagaagcagacattggaacgtaagttttacagtaaacagagcctcgaaacgactcctggccttcaaatggacttgaactggtttctgactcatctgtcttatgtgttcctgtcacataagcctcttggaagctaacatttctggctattgtaatggctactagtggcaagcattttagcattctttatttgtccgtagacaagccttgtgaagcgct

SEQ ID NO: 396 - DNA, 555 bp, Rattus sp.
aaatcagaacaaatgaagtagcagcaaaagaaccattcggcaatctggcttcactggtcctcaaacaaggagggaatgcagccagagatacatctctcagcctcagcctctcagaatctcacttgggccctaaagtgcatctgcttggtggcattgttcttcatcccggtcttcagcatccatttcgacttcatcctctgtacatactgcatgtcccgttcacgcatgagagctgctcctaaaatcatagaagtctgcaaactccagcgcagcatcaccatctgtaaagagcttacagtggcttttgtcattcatgtgtgcctgcacagcttctgtggaatagaaggacttccctttctcattgcaccacaagcagattttgccaacaccaactttctctcccaaatatttaattaatcctttcaaatctgaaagatactctatatcaggaataaaaaagctgtggactttagtcatatgagccacattcttcacaagggagcttgaatgatgggaacaacataagcagtctgttattgggatggcacctaaggg

SEQ ID NO: 397 - DNA, 672 bp, Rattus sp.
ataatctttattgagcttctgttacagaaggggtgtgacatttgcccttatggtgagttagtctggatgcgtgttctcagcccgaatgagaagtaaaatcttaacagagcacagaatagaaaggaccttggggatcacttagcccagcccattattttcatggaggaaatgaaaccaaagaaaggagaacgatctagcgaaggtctcacagcaagggaggctggtccctgtcaatctccattcctaaccacagtactctgtgctaagctgtttccccaagcctttgggtttgctggcttgctttatgtggtcccactggttaaacaaccaaactatcaggtacctaacatgacggtagggacttttacttcagctttaaaatcagcatatcgaaatgattcctgagcctttagctacttcattattgagaatgcagtccacagtaaatcatggctatctacggtagtcatcttcaaatgtttgcacagacaccaaaagcactaatgacacttgtacgaaagcatccatgcgattccaggacgcttctcatggaatacagcggcaccatggtggtgaccagaagaggcttcagtctctcaaagtgcggtcatgagtttgtcccggtatgtgacactgtacgcccctcctaagttcctctggatctggtcgtgg

SEQ ID NO: 398 - DNA, 531 bp, Rattus sp.
atctaatttcatttttgttagctcgtgctcatctctgtagaatttcccccaagaagctgaagaaacttccggggcccacgttctctgagggaagacttcctgtttctgtggctttggcgagtcctgccatggatgctccacttcctgtgaagatcaccaaacccgacatttcctttctggattcatgtatgagttcttgcggcaatgaaaggcatccgcaaactcagcagagttctgcaaagtcccaatgatcctgaaattgccaggactgtgtacatctgttttaatggaattgactgcatactctggccggtaggttccacaccacacctgggcaaagttcaagaagaatagttgtttgtgattgaggtcaagtccagggagtaatttttcttcaccattctttttaacataattctgataggctctgtatgcttggccaatccctccattatcagcaatattttctcctagtgtgttaattccattgagatgctgtccacctgctaagtcccatgtaaagtttccatc

SEQ ID NO: 399 - DNA, 480 bp, Rattus norvegicus (Norway rat)
tttttttttttttttttgtttgtttttgattttttttaattcacaccgaagaagttgggggtgggggcagggagggtgatttctttcagccgcgaggttaaccgagtcaacagctgactctgctgggctgctgtttgcacacgaagtccgtcataaaatcaaactcattttggcccagccagagttctggcagctccttgatgcggtccaaacccatctctatcactaaggacataagcacttcctcgtcgatgaaatcagtgtctatgacattgggcggcagcattgccgcggggacgtgagccaccgaggcgggcatggtgctgccaccgccactgccgcccgcgctgctgccacccgcgccgcccgaggtgccgccggagccgccgggggtgccgctgccacccgcgccgccaggggtgctgctgcctccactgtgcttggggttgcaatctcggaagtgctggtttgtcccgttca

SEQ ID NO: 400 - DNA, 309 bp, Rattus norvegicus (Norway rat)
tttttttttttttttttggagtttttcagtggtcttgatgatgtcataagaacatttgtaaaagggaaggcttttagaagagggggtatgggaagggtgctggctttaaagcagaggaatattccagtgctgagaagggtgatctgtactgaagagaggaggagaggactctctgaagcactcttctgaagaaggctagtcacaccaccaactcagctttctgccagtgaaactcatttcagatttcggagctccacaacggaattagtggagcttcttgagatacaggtagatcccatttttggactt

SEQ ID NO: 401 - DNA, 464 bp, Rattus norvegicus (Norway rat)
cggccgcaagctagcgatcgcattgtgtgccaggcgcaggacgtgcaggcccagcaggcctgggaaggtgtcctccatgaggccagccacgcggttgtgcgacaggtccagccaacgcagggccttcatgcccagaaaggcacgaggggccacggctgtaatgaggttccggtccaggtacagcttctgcagcctgggcaaatgtacaaagacgttagctttgacgcttcggagtgcgttcctgctcagatccagctcccgcagctcgcccaagccacagaagagcgcaggctgcaggtaagtcagtttgttgccagccagcaccagctcgtggaggttgcccagtccctggaacactgtgtcaggcaggaccactagactgttccaacccaagttgaggtcccaaaggtgactgaggccctggaacagcccttcctccagccggcccaagaggttgctgctca

SEQ ID NO: 402 - DNA, 378 bp, Rattus norvegicus (Norway rat)
tttttttttttttttttcccccttaaatagctgtttattggcagtgggcttgataacttgggggaagggacggccatcatctgccttctggtatagtgtctcgtggaaaaggatcacccctccaatgcagggattcacacggtcatcggcagtcagcagcagttggcggtagaagcgcctgttctcctcggtgttctcggtgccaatggactgcaggcgcttggcaatgcttccagtggactcgtctgcagccaggatgcccttgcccggagctacaattcggtgagcgatgtcagccagctccttcttctgctccggggtcagtgctgggtatgggtggggcatggtgccggtggcagcgctttcctggcacaggac

SEQ ID NO: 403 - DNA, 406 bp, Rattus norvegicus (Norway rat)
tttttttttttttttttactattcaagtttgtttatttattagcttattaagccatcttactgatttgtactgaatagtggagaaagtatacactggacataatatgattttgtgaattgtaaagtgatgtcagtaataacagagtcggtgtcacagtccttggcatttacagtttgctttctgatcttcctttggctggattgaggcttgcagacagactcctgtccttgatgtctatcttctcatcttgatcagagttccatgcagaagtttagagaggttccgtccatcttttgctcatagatttcatcaaacctctcattctgggccacagtaaagtggtttttccaatcacccacaattccttttctcatgaaaggggaaatggactggtccatgatagtc

SEQ ID NO: 404 - DNA, 539 bp, Rattus sp.
aaaaaaaaaaaataacatgtataaatagctcttcactttaaaaatacagttccccaggttgaggtatacggtggcctgttgtcagggcagcatgagaacagtagagtgccagggcggggcggctcctctctagctggagacagtcatcacgtagttcttcgatggactgctcctgcccagcatcatctggttcttgcaggtgaggagcccgtaggaggtggccaccggcgcctcctcatacagcacgcagatggatccatcttccccgatgcggtaggacacttcgtagggatcgacccacagggtcagctcgctgggcaggagctggtgcagctggggctggctgagtccgatctggctggccaccttgctgatgatggggtccatcttgtggttgatgcggatacagcgatagccggagcccttggatggcttttctggaaaccagtggtgtttgtaatgatcggtcagtgcgtcctggagcgccctactgaaaaccttgagtctctgctcgctcaggcagccccgagtcctcagga

SEQ ID NO: 405 - DNA, 542 bp, Rattus sp.
cagcctcatcatcactgacttccttgtcacgttccttctccacaaagagagtaatggggtagccaataaactgagaatgtttcttcacaatttcttttattctcctttcctccaaatactcagtttggtcttcttttagatgcaagataacctttgttccacgacccattggttcacctgtgtctgtcctcacagtgaaggatcctccagctgaggactcccaggcgtactgctcgtcatcattatgcttggtgatgacagtcactttctcagcaaccaaatacgcagagtaaaaaccaacaccaaactggccaatcatagagatatctgcaccagcctgcaaagcctccatgaaggctttggtgcctgacttggcaatagtgccaaggttattgatcaagtcagccttggtcattccaatgccagtatccacaatagtgagggttcggtcttgcttgttgggaatgagattaatgtgcagctccttccccgagtccagtttactagggtcggtcaagctctcgtatctgatcttatccaga

SEQ ID NO: 406 - DNA, 561 bp, Rattus sp.
acagaaatccacagactctggggctgggtaaatgattatccctgccacattcatcattcatgcagctcccaggaagaatgactgctctatattggacataaatgtactgatggagtaattgaataagaaaaccattcagaagttgaaggaaaacagttcttcacagtttgagtgcacacacgtctgcgtgtatttcactagaaaggacactctccataaggaaagattacttttgcgtaagagagtttgacacgagggtttctacgtgacgctgtttgacaaggatatgacagctatttcatgacaatgtttggatactccagcgtctaagaagcttgttttgttttattgaacattaagaaaatatccgaggaagtgatcgagattgaggttttaactcaactagatggcatcccagcaattcctcatgagtcatgtctatatgaattaacacagaagccttagaaaacatgttaccctcccaataagtacggtcaacatttagtcaaaatacttcattgttgcagagctttctgaagctggctttgtgggtacagtgta

SEQ ID NO: 407 - DNA, 477 bp, Rattus sp.
gatacgaactattataaatatgcacaagcaaaggtcatctttttctaggagtcgtcagaatccaagttggaaggagacaccttttgtaaaaccttccatgggtccctgctttgagataaacatctaattgctgaagtctttattattattataaacgatcacagcgcatgctacttgatatggctctcaactcaagcgtctgctttcccagtgggctgtccctctccccttgcaacaccctcttcatccagccttaagaaacactgcaccatcttctggtcaacagtctggacttgtgggttgctggggagagagtatgagccaatgatagcatgcaaggtgtctattcctacaaccagacgggagggactacaggctctcaccccagcatacagacactcagctgtcatttcacctagctctcattatctatcgataatgcagcagagaggttgggggctacttctcaatggttta

SEQ ID NO: 408 - DNA, 535 bp, Rattus sp.
cttgcggccgcatgtgttttttttttttttttttttttttttgtgccccatggtagtgggaaccaaaccaatcacaatgttttattggaacatattccatcatcacaggatagcatttattaaacagtggcggatttctctagctgctacatttattctcattcctcatacataccttgaggtgcatttgattccaggagagccatttgggttttctttagctaaataataaatgtacccgtctcagtcttttggactgagtcgttctgaaggctctcgtgtggacagcagtgtgtgcagtcgtgcttacagcccgtgcctgctccacatggtaccagtcttaccagtgcttgagagctcagacacaccctgctgcatgaagttggaggtctcgggagggttttagattttgtgacgggaaccggaaaggctcgtcagagtgtggctgtgtcatggtgagcaccacgtggctgtagaggcctgacatgaggtaatgcactgagcacacaacgccactgctgctgtctgtggctgt

SEQ ID NO: 409 - DNA, 425 bp, Rattus norvegicus (Norway rat)
tttttttttattgtttttttttaacgtcattaacttgtgttatttgctttcctttaaaacacaaataaatcaaagccattaacctgaacttgaggtatatacacaatacatattcaactttaagtaaaatactttccataatattattacatttttaaaaactggaaacagtatccgtgctgatccgtatttgattcaatgtaatgaaaagggaacattcacttggggcaaggtgggctcgtcgaggaaatagagctccaagttcaaatgtcttcctctcccttgtattcattagaactctcccatgtccggagaggattcatcatgagaaaataccagtcacaggtttggaaggaatgagagagcacacgaggtggtgacatttcatccgttttcaaataaatggtcttaattttcttcatgta

SEQ ID NO: 410 - DNA, 474 bp, Rattus norvegicus (Norway rat)
tttttttttttttttttctcatagagaattttaatctgaaacctttaacagcagagatttgggccttcatttgaagagtcttcaaaagcctcttacagctgtaacagttagggtttctattgccacaaaacaccatgagcaaaaagcaagttgggagggtgggggtgggttatttggcttacacttccatactactgttcattatcaaagaaagtcaggacgggaactcaactgaggttcccttttctctgatgaccctagcgtgtgtcaggttgtcacctaagaccagccagtacacatactttagagaaaaaaggttttattttggggagggtgttaagtcttgctatgtagcctgctttcttaggacccaggatgaccagcctaggggtggaaccagccacagtgggctgggccctctctcattgaccactaagcatccttacagcatttcctcaactgaggttccccctc

SEQ ID NO: 411 - DNA, 408 bp, Rattus norvegicus (Norway rat)
tttttttttttttttttcaggatttgcaaagttttattttaactcattttgcccataaatgactaaaaaaagccagtgtgcaggaggctgtctgctgtctgctgaaggcagcgccaggcaccgggtctgtctccgagaaaagaggctctgctcagaaccccccaggctgggaaccagatgggagggaggtatgggatggagaaacaagccaggtaccccaaggtctaccaaactctgttgggctgacaacttaaggtgctcaaggcatcatggaggggaagggcagtgtgtggggttttggaagggtccacgtgctgacccaaggaactcctggccagcaagtgggggctggcctgtcactgccagacaccctcctaagagaacctctgggtgtcactgtctaatgta

SEQ ID NO: 412 - DNA, 414 bp, Rattus norvegicus (Norway rat)
tttttttttttttttttaatgtgctgtgtaaagttagtctactctgaagccatcttggtaaacttccccaacagtgtgaagttagaattccttcagggtggtgccaaattccatttggaatttatttatggttgcttgggtggagaagccattgtcttcaaaaaccttggtgttgctaaactgccagttactgttgtaacttaatgagtttcaccatttaaagggtcatccaagcaagatcacaatttggttataaaatggttgttggcacaccctatgcaatatcaaaattgaataacggtctcagataaaataacagatgggaatgaagcttgtgtatcatccattatcatgtgtactcaataaacgatttaattctcttgaaaaaaaaaaaataaaaaaaccctcgtgccg

SEQ ID NO: 413 - DNA, 365 bp, Rattus norvegicus (Norway rat)
tttttttttttttttttccaggaaaactgcatttggcacgtcgtatgcaactcccttcccaaacacgggcgttgtcagccgaccgtagacctcttccgcattcaggtcttcgttcttactgttgaagagcagggcggctgcgtcactccccaaaaggtaagtgaaagtcttgcccaccatggtaaagctaaacacaggtccgtacttctcatatgcattttccaggaactcaattggacttttcccaaatgctatcgcgtggccaaggaacggaattggagagtaaatatatggcggacttttcgctccagcgggcagctggaccatgtggcccactgcgaggcggaacaggtagacaaggctaa

SEQ ID NO: 414 - DNA, 493 bp, Rattus sp.
gccgctgtcatcctcctcatcagatcccacatcctcaatcttaggcttctcctcatcctccttatcttcctcctccttctcccctttctcttcctctgcctcatcatcactgatctccttctcgcgttccttctccagatagagggtgatggggtagcctatgaactgtgagtgtttcttcaccacctccttgaccctcctctcctctaagtactctgtctggtcttctttgaggtgaaggatcactttggtaccccggccaatgggctcaccgtggtctgcacggacagtgaaggatccaccagcagaagactcccaggcatactgctcatcatcgttgtgcttcgtgatcacaaccactttctctgccaccaggtaggcagagtagaagccgacaccaaactgcccaatcatggagatgtctgcaccagcctggagagcctccatgaacgcctttgtaccagacttagcaatggttcccaagttatttatg

SEQ ID NO: 415 - DNA, 496 bp, Rattus sp.
agcaaaactggtaaaaacaaaattgtaatcgttgaacatagcgctctggcaatcaagacgtttgaaaccgtcaatcttctggggcgaagaaagcactgtgcgacacttagaactctgattaacagacaaggtggtcacaaattttcctggcttgaagacttccacaactttcctgatcaggtcatcataggaggtctgacttaggtttgtttcaaagctaacataagaaaattctggttctggagtgatgtgaatattccaatatgttccatccgatttcattccattcattgagtagccacaaggattgaacagtgtggcatcaatgacagaacctggtatcaggtcacgaattccactctcacgagtgacatcctttgcagtaacaccatctttcatgtagaactggtccataactgctgggtcaagctcactcatcagaatttccacggtttgatctggctgattgattactcggctctctgggagcctcgtg

SEQ ID NO: 416 - DNA, 408 bp, Rattus sp.
gggcggagtctccctgacacctggccttggagggacgcggctagtgcctgctccaggcctctcggccgcgcagtcagccttagtgtgcggaatcaggttcgagcttcgccttgtcctcttctgcatgcgttactgaacaggaccagttgccagagcccttgacagagaaggctttgagagaagccagctctgccatcgacaccttaggcgaagccttggtggctggggcctattctaagatgtggtcctgccgagaagatgcactgctggcattgtacaagaggctgatggagatgcctgttggaacccagaaggaagatttgaaaaacatgctcagagcatctgtctttctcatcagaagagccataaaggacattgtaacctcagtctttcaggcttcactgaaac

SEQ ID NO: 417 - DNA, 601 bp, Rattus sp.
acatctccaacagatttattttaaaggaatgacctaagggagaaaaaaatgggggtacagaagtatggactagaaaataaatacaaatgtaagctgttttactaattttataaccacaaacgtgtacagagaatggtgccctgtacaaaacacaacagattcaaacgaggtgttcccttagcaaggctgaagattcagtctctggtatttggaatttaggatgcagtccttgtttttggatggatcactgggtgtttggcacagtccatgctattaaccagatttgaacaggagaatggccacctgacccaggtagaagtagatgaagtgtttggtctcgtgtgtcacgtagctaccgaagttccggcccacgatgcagtgccaggtggggttgtacttcttgtcaaactccttcttgatatgggccgcgatatccttctctatgttgtacttctccaacgcctgagtagcgcactccaccgagtcctgttgcatctcttccgacatgtctgcatttttgatcaccgccttccggtcgcacatggttaccgtggagcaggggccagccggctgctgcgagctcctagggaaggtgctggcg

SEQ ID NO: 418 - DNA, 495 bp, Rattus sp.
  misc_feature (308)..(308): n
cactcacacacaatattgtatgagacattactagttttcatatgcatccataggattaatactcatatggagtataacatggaaaagtgcagaactaaagaaataactctaacaacaaaagaagcacacgtttcttaaaatttaaaaatattgcacatagtaaggttgcacagaaattactggctgcttttacaaaaagaatgaggtattagtcaatctctagataaagataagtgcaacagagtaactacacacacacacaccaaaaacaaaaaacaaattcatacgaagacctagaaagtcaacanacaaaaatattcaaaaagaagtttacaaagctatgattttgatcatacaaaatcattagcccattactaaaacacaatttcttggcaatagtttataaattttaaactttcttcagcttaactacgtgcaatacaatcatccccatcacaccaattctcctgtagaagaggaatctttctgtgatag

SEQ ID NO: 419 - DNA, 613 bp, Rattus sp.
gaggttacacagtggccttgatctttatttttctttacctggaattctacaaattctgaaattgatcaatagatttatcttgtttaataaacagcaccagtcgtgcccactgatacaattcaaacctgactttctcagttctcaagtttattatgaaaacactgcggtgacttgtgcagtacatcatcttacaggagggagacagttctgttcaaaacaactcaccaggttttctgacagtaacaaagaacaacgcggggccgagatttgagaagggagaaactgagtgcagagaaatcatacaattaaattaatagtatccctgaaagaacacaacaagaggggaggccttggtactcatttaaaaatgttcattaagctccaatgattgtttgctatcctcatctacagtcatgctgagtaagctacagctaagtggaagtcaactggactcacaggtgttaatgttacatcctagatctgcagtctctcaagaaagcaaaagtaactacaaatagcgctatgccagaaactggattcttgaccaacaatgtcgcgtcagcatgcaatgaactggttcattctaaagtggtcacggctgttgatgacaaga

SEQ ID NO: 420 - DNA, 614 bp, Rattus sp.
cttgcggccacgagatttttcttttatttttttttttttttttttttttttttttttttttttaattttataacattgttttaatcaagtaatgtagctgtttgaaacaggaaactttttaagacacctcaatagagccatgaaggattactcttaccaggttaacctccatgaataaaaacccagattgtgtgaaatttgaatcccactggtttggcaccagaatgaacagaagcccaagaccttcctaagtgtctaagacctgaccatttccctttaaagcaacagctctaagacaaaatcttgccaacctgaggccgaaatgtgctgatctacttgagaatctcaaaaagtaatgacatatggatgggctgcccatgcaacaaagagtctgaaacccaggagacaagtgactttccaagtcccacttctttggtgtgacacagcacattcccctgttaccattccaggtatatggctcctgttccacgcccagcctcctatcaaggttttaattttaccaaatgtttggtatgattttaacgcatactttttacattaatcaaagtcttataatctgtgagatggatgacacaaagaataagatccaaata

SEQ ID NO: 421 - DNA, 417 bp, Rattus sp.
ctttacacagatttaagccagtaatttttagcaaaatgatacaaaactgtcttaaccaagtagaagactggtagctgcggtgggatcatcagggagcgcaggtccgccaccactggtgggagctgagaggctcttcacagggagtcgggttctctctgcaatggtttcccagcctctgctcttcgtcccagccccatgacaactgagctcacatggggccatggtggcagcccctggcgatggcagctcttggagcctgtccatttagtttgtgttttgattccccatgtgcatcgctgggtgagtggcctggagagctcccggcgttaacatttcgggtttagaccggggggcgtgtcactagtaaagccattggtaacagagtagatcagccatgcattgtctgcccttcacagc

SEQ ID NO: 422 - DNA, 448 bp, Rattus sp.
aaaccaatttgtacaagtttatagtttactttgtttccaggttctcaaacctttcaggatctgaaaagtgagatactgcgtctaagggaatgtttttgtttttttgttttttttttgtttgtttttgattttttttaattcacaccgaagaagttgggggtgggggcagggagggtgatttctttcagccgcgaggttaaccgagtcaacagctgactctgctgggctgctgtttgcacacgaagtccgtcataaaatcaaactcattttggcccagccagagttctggcagctccttgatgcggtccaaacccatctctatcactaaggacataagcacttcctcgtcgatgaaatcagtgtctatgacattgggcggcagcattgccgcggggacgtgagccaccgaggcgggcatggtgctgccaccgccactgccgcccgcgct

SEQ ID NO: 423 - DNA, 474 bp, Rattus sp.
atgaccaagcatcacaaacacttttatttgtggttatcagttatttttacagaataaagaactcattaatttgtaacactgtacattaaattaaaatataacccatccctacatcaaaaattatctaagttgaccaagataaaaaaagtctctaaaagcttatatacattagaagtagcaaaaataataataaaggaagaaattagaaaacagacatcaaagtcagacatctagaagaattctccaacatctgctctcttatctcggcatttgcttcgggcttttgttcgagctttgaaagctgcagagttatataaatgcctttcaaaacgaggaatcttcatggttttaagtgttgcagcatcgagcatcacagggggtcccagctcaaatacattgcgaaggaattcatttgtctgcaagtggtactgcatccctgatccaagagcctctttaaacgtgtcataagtgtgc

SEQ ID NO: 424 - DNA, 510 bp, Rattus norvegicus (Norway rat)
tttttttttttttttttcaggttttaaacatgtttagagtaaactcgcatcttttacagacaacattctgtgacagtgccatgtgaatggctcctgcattggtgttttttctatctggctggatcctgctgagggcatggagccagatgccgtcagctacagtgtctgctgtcttgtgaggcactgaaggtgtgtactcagccgatgtcaccgcatctctcagtgatgcagcacggctggggggtccctgctcctgtgccatctctcctcagctttgcagtctgtaattaacttgttcttccggagactgagtctctaaaaaccacaaggttgcttcaccttgcttctagaactgggaccaggcttcagatgtgacagcaagagtaaaaggattcttcaaggcctctgaaatgagcccttggcatacaggtctgaaagtcccattgttggcccctggctggctggagtggaaaggctgctcaccctgcacaagatgtgctccctgcatgt

SEQ ID NO: 425 - DNA, 388 bp, Rattus norvegicus (Norway rat)
tttttttttttttttttgagactgggtacccgcattgttctgaggaggatctgttctttagtgtactggaaacacgaggttaccagcaggcacaacagggaccctttggaacccttacaaaccagaagggtcacataaatgtactgcatgtgaggtggtgagggaaagggacaaggggaaggggttaagaagagaaatctctggtccactgtgactttcttcagcctggacagttgctcttaaaggggtagctttcttccagtgtactgtactcttcagagcagcagacggctgcagggtgtgcagccagcagcagacgtatcagaaagagtaagtcctaaccccttggttagaaaaacaggagacagaagttttaacacccacctta

SEQ ID NO: 426 - DNA, 103 bp, Rattus norvegicus (rat)
agagaaggacttcctctcaagcgacctcatctttctgggctcggacactcacccacctctgttacctgatcgccctcgagcccacgtgaagaaaaccattctg

SEQ ID NO: 427 - DNA, 341 bp, Rattus norvegicus (Norway rat)
cggccgcaaaggtttttttttacctactaagaatggtttgattttgttttaaattgggctcccttgtatgacacatagatattttacaaccagaatttgttttgagaaaagaaaaaaaaaaaaaaaagaaaaattcaactatcttacagttacatacatatatatatatacatatatatatatatgtatgtatatatatgatgcttataaaagacatttaggagaggttattatgaaattatgccataaggaaaacttaatttagcctgtacaaatacctggctatgacaagattaaaggaataagtagaactcctcatgttttacattctgacactttca

SEQ ID NO: 428 - DNA, 545 bp, Rattus norvegicus (Norway rat)
tttttttttttttttttgttattccataccagtttattttagataatgtgcttcaaaaacgttttatcataaataacctttcacatcataaaataacttagtacgatttataataaaacttctgagaatttaacatctcatcaaaatacattaaactgtggcttgaaaatatgattaacccttttcacttttcttttatttgagggcatgaagaccaaaaaaaatacccaaaatattgctacacatttaaagtttcaacaaagcaatatttggtttactttactgtaacccggccatcctaaattaatagttttctttcttgcacagttctttgtagtttttttgtcccttttgacttggatttctgtttccacacagcttcctccttcagtctcacctctctctccttctgcaaagtcatctcctagccctcctgtagttgaactcagccccttgacatcagtttctgtaatccttgcatcagcgtggggagtgactgcttgagtaactacaaaggtatttcaaaacttcagtgcaatttggtt

SEQ ID NO: 429 - DNA, 130 bp, Rattus norvegicus (rat)
accaaattgcactgaagttttgaaatacctttgtagttactcaagcagtcactccccacgctgatgcaaggattacagaaactgatgtcaaggggctgagttcaactacaggagggctaggagatgactt

SEQ ID NO: 430 - DNA, 602 bp, Rattus sp.
gatggctaactaaggactttatttcaaacaaaaattaaaaattaaaaaaaaaaaaaaatgagagctatttccctgggtgtgaggaaaggatcagggtgagaaatttccccatggctaagccaataccctcaatatattagagggatcgtgtcagttcccttccttacccccatgatggggaacctaagcaagtgcaggacccacctgtcgggaatgtgggctaggggtcagcccccaaatggggacagagttgggcagcagcatggccaaacataggattaagtcctaagtaccaagaacccactcctcccatcttgctgggacccagggaaagtaaaagatggttttgtagaaaacctctgagatccccgaggggaagaaggttccagtcctcctcatgttcatcatctctgttctctggagggcagtgagtcctgggatctgtcaggtggcaatactgacacagcaagaggtggggaagccccagcaagtctggaccccatggttggctctcctaccctttggccagctctcatggttaccacatgatcctttgtgttttttgccttccatttcccttgggtaggtggttaggtaggtgg

SEQ ID NO: 431 - DNA, 424 bp, Rattus sp.
ggtttttttttggtaattagcctttttattgggttttttttttttttaaattgaagggcccttactggtcctgcttccatgaatggccaaaatcaagggaaaggggagggcaaccagctggtgcagggagggtcatttccacagttcatttacccccagaactaaacagacaagcccagagtcactattggggttaaaagttggcaccatgggatgggacaaatgaggagtaggggtgtcgttaaaaaaaaaaattcagggtccccccaaactgggtgcctaggacgggacttggtctggttcaacccaagaggaatcagaagatcaaaagcaatttgggaaggccaaaaccgtcagggatggagggaaaaggacggtccagggggtgggaaggatttttggcaactggggtgaaaggaaaacc

SEQ ID NO: 432 - DNA, 424 bp, Rattus sp.; identical to SEQ ID NO: 431

SEQ ID NO: 433 - DNA, 448 bp, Rattus norvegicus (Norway rat)
  misc_feature (401)..(401): n
tttttttttttttttttctgtgaaaagacaaaaggaccaaactttatttctctacgcagccttggctggcctggaactcactatgtagaacaggttggccttgagctcacagagatcctcctgttgctgcctttagagtggctacctattggcaacaagcgccctcagcagagcactgatgagtcctcagagctcgtcggacgtgatgttcaccttgggtaggttacattctttactagtttgacagctctgaagaatgtcctggtagtggttcttcagatcctcatacaaggcaacagttttctgcgagtgagctaagggtaacaccttttcattcagcagcatttgtatctggaatttttcttgaggggtctgtgcgtcttcacaatggtaaagcacanatattaggtttgaagcatatggtacgatgtgaccacttcggaactcc

SEQ ID NO: 434 - DNA, 590 bp, Rattus norvegicus (Norway rat)
  misc_feature (135)..(135): n
  misc_feature (163)..(163): n
tttttttttttttttttctctgtgcacacagctttattggatatcgctggagcgtccccaagtggctctgattactggtgtgacaggaggaggtggtgcctcactggagatacagacaatgatggctgacattanatgactggggtgggggcccagcacctanggagagagtattaccatctagtcacgaacactctctgcactgccctgatggagagacaacagccagaccccgtcacagcagcagagggagcggagcgctcttcagcactggggagctagcctggagctttgccattgcctgctgttccaaggtccaacaggactggagcaggatcttccctcaagtccagccagcctgtggggtcacctgcaaagtcccagtgccttcaggatggtgtcttgccaggggtggcccctgtcttctttgatgctcccttcagcagcgcaagcttcttaggcaggctggagctggccttcatcaccacatcatgctcaatcttcttccggattcctacttccaggctcttcttcaacttttgctgctgcacaacgcgcgccttcttgggagcgatgactcgaccgccttt

SEQ ID NO: 435 - DNA, 652 bp, Rattus sp.
ccacaacaggatttattcaatgataacattcagttattcagacatcatagaacaacataaacataaacatcagtgttcataaaatatttaaaacttttgaaaatttattcccatgggaacatccctggagggaaaccggccattttctcctggaacactttatcaaaggcttcagcttgggctactgtgaagtgattcttccagtcattagttgtgccttttctcatgaaagtaaaaccagtaagaatcagttccttctccatgaggctataattggacatgttgttttctttcacgacttggaaggaactatacttgaggaccaaattcagctcatctggctctaattttttccccaggaagtcacatatcttctttatggatcccattgtatcctttttcatgtcttcatagtacagtaccaagaagttgtcccattctctcatagacagccagccacggatgtgctcaaaccatgatccatatgcaacatttcctttgaggaaccattcaacgtaagttcccagcgagtctggtttcttctccagggcgatcttactccagaaaaaataagcagaaacaagaacatctctgggaatttctgatgagatatatcaccttggccttggaactgaagagagacttggagaaa

SEQ ID NO: 436 - DNA, 629 bp, Rattus sp.
agaaatacccaatttaataaagatggagaaaaaaataaagccagatcccaaggtccattccctcattcatcctcagagtcattcctggctggagaatgagcttatgagggaaaaggtcctatacaacaggtcgagcaagcgcaggaactggcggtctctgtagtcaaagcgctctccaaagacaatggagcagattatgttgcctgtgacgcactggaagaggaacgttgggtccagggagactccctgatgattcttcagttcctccactaaacatttggcctcctcctttatctgatcctccacactctgctttcctatcccaaagtctctcatggtggctacaaataatcgccgaaggatcttccacctttcttcattaacaaaggacacaccgtattcctgcataattggctgaagcacagcaattattccccggccagagaaagcctcagcatggtccaccagagcctcccttatggtctgtgtcccacacagcatgaccacaggcctaggtccaaagtatactgtgaacacatctccgtgtttttcttgaagctgaatgaaagacttacgaaagcctcctctgtccatctgcaagaggtttcccaagaggggtaagggacggg

SEQ ID NO: 437 - DNA, 722 bp, Rattus sp.
gttgactcacagattttatttacatttgtctacagtatcatttccttatgaaatgaactagtacagctcaattaaaccaaatcaaatcataatcatctgaactgtttgtaaactcctattagctaaatttataatcttgcatttgcctagtacagctcaagttttaaatacagaaagcacaaaaacaaaccaaggctaacacgtcggatctagaagatctgggcaactcagaaagtcgactttcgagaagtctgaggcacaattacaagagagtaagagttcgtgtgcaacctacagtaaatgcagcaaggaaaataagacaaaaaacacaggaaagcttgtaaaaatattaccaaaatatttctacgtacgatattttgttttcatctttagatcagttgagaagaaaaacactcactttaaaataaaaacatttcgtttgatctgtctactaaacatctcagaaggctttacttatatttaaactgcagcagacaaatactaaaggagaaacaggaagtaattccctcacaaggagccccagcataactgttgtcccttatatacttaccttgcttttgctgctgaaaagactgttaagagaaaccttataacttttaaaccagagaacaaaatggatctcaagtgaccagattttaatttgagaaataaaactctgaaagcattttaagccatatgtttttttttccaggtgagaaaaa

SEQ ID NO: 438 - DNA, 663 bp, Rattus sp.
gtaattccacaccagtttatttcttaggtgtgatcgtgacacagtgccttctgtgacaaggtggggctttcaggagggcactgaaccccctcctcagagcagctcacctcagaaaacacccgaggcagatttgattacgaataccccccaggccaccaatatttacatgggaaagtggaactgagtagaggaattatgacacaagaaagtggggtgtcctgaagatgctggggggcatgaaggcaccatcaaaagtctggatctccttctcagcgcggggctctgccctctagggccgtccttccgggtaggtggatccagggagaggagtgtagctggaggagtgagacttgcgccatctgaagaagccaagacagaagatgatgaagcccaggcccagggtggctgcagacacagagaccttcactgtctggatgggggacagcccgggtgtccagttcgcgcggatgggctcaggggtcccgctgtgctgtaccacgcaggtgtagatgtcccagtaggaaggggttaaggctaggtaggagacggtctggtatgtccagtccccgttaggctgagccgtcttctccttgttgctgtgggaagttacaagctgcccgttcttcatccacacgacggtcacatccgctggatagaaacccc

SEQ ID NO: 439 - DNA, 601 bp, Rattus sp.
ataccaaagaaaagtctttattgtaaacaaggtataaagtacaacaaaaaatattgtgcaaattgtaactcgtgattttttttataatttttaagaaaactctttttttcaagggttcaagtttgcatgtcagaaacctatgagatacagaaacggtttaaatgggaaggtatggtgagtttttcactgtggactttgaataatttacctttactaccaagtgtgtcttctatccactttacaacagaacagaaatactgttagcaaaagtcactgctttcaggtggggatacaactcggtgacagagcttacagaacacaagcaaggctctggatccccagaactgcaggtgtgaccacattatgacactttaaagtctcggagtttcccggacacccagacactgcagcggcaggaagaacgtatctgcaccatgaatatccttgtcaagtcggaagtgaatgttctagtaacaatttcctacctatctactcagacatcctgacaaactcctataaataaaaggacacctgtccatctgtgatggtcactaacttcctgatttgatagaaacagtgtacgtctgacgtaagtgtcctt

SEQ ID NO: 440 - DNA, 644 bp, Rattus sp.
attatgaatgacattttattcagtcattttctttacaactgaaactctgggaattcaaagttaacatccttgcctgtgagcttcttgtacacgccagaaaaagtttcgaccttatgctccacgttgttctgctgtgctttgtctaaatgaacttttatgagccggctgccatccagtttcacacggatcctcttgcccacaatttcacttgggaagaccaaatcctcaaggatggcgtcgtgcactgctgtcagggtgcggcttctggggcgcttttgcttatttttcgtacggctttttcgggttggcttgggcagaatcctcctctgagcaatgaagactacgtgtttcccactgaactttttctccaattcacgaactagccggacttggattttctggaaagatttcagctgaggaactggtacaaaaattatgatggcttttcgaccaccaccgacttcgatttcctttgccgcggtgatgttgagttcccgcagctgcgccttcagatccgagttcatctccagctcgagcagcgcctgagagatgccagactcgaactcgtccggcttctcgccattgggcttcacaatcttggcgctcgagctgaacatggcttcgtccttacggagcctcgtgcc

SEQ ID NO: 441 - DNA, 421 bp, Rattus sp.
atctcttatttacaaacactgggtaggacacccaaacaaacaaacatggaataacttacaaaggcaggaagctgtttattatagacagtaatcagctttcatcaaattaaaaaaaaatatatgtacatacacagttgagagaggcaggccaggggagttcatccgcaatctagcctggtactcacaagcctccctccccttcccagccctccctgctttgtgttcttacggagcactacagaagcaatctacagtctctattgcagtttgtaagcccccacccaccccccttaatactgaatgagatcgaatgttaggtccatgcagttcttggtcaatgttaacgaaaagtccatcgttctggtcgcgcgggcacagcccgttcgcaaagcgtggcggtcaacaggccgctgctctctgg

SEQ ID NO: 442 - DNA, 650 bp, Rattus sp.
ttcaagcacatgatttgtcttgatttaatgcctttttaagtgccctcaaaaactgaggggaaaataaattcactcaaaattattttaaattctttttaatcccctcaatttagagtccaagggctgaaggacttataatcatgattcccctttagatataaatttataaattgcacttgcctctgttaagtgtttcttttgtggggaaaatattatattaatttttactgttgcatgcagaggtaaccctttacccacatagaggcatttcttccatagagcctttgagttcaaaccattttttccctagttttcttttattttcctttttaagattttcaaactgggttacacactggaaaaggctgggttaagggccaaaatttaataaatctgtacggataactaaaggctacagagatttttatatatatatatatataattttttttaacttttagaaatcagagtgcttataaaatggctggctcatggctctgtccccagcccctctgacgccgcctcctagccttcgttgttgagataaccaggaatagtgactccatgcgtaaacaacaagaatactaaccaagaaaactagcttatcatgcaaatattaaggcatctagaaagtcagttaaaatttattg

SEQ ID NO: 443 - DNA, 632 bp, Rattus sp.
tccagaatcagaattaagcattaagtgtccaatattataaagctgtttataacaggagttttaagtagtggtaacatttaacccatgtaaaaatgtcaacagaatttaaatcgtgacttggatcctgaacgattcaagtaccatggtctcactcagagacgggtttggtcagttttaagatgaactccttcggatgtagtgtccgtaagtccttattatcgctgtccatcaattcacgataggatagctggctgcggtggcaagtccgcagtggttgttccggtctttggctattttgatgtagccatccataccccattctttaccccagctgtttttgacaagccagtatttatccttatttgaatctgttccttcataaccatagccaaccaccagaaccccatggtcgaggtccttgctgctacagttgggttcatagtagatacctgaactatagaactggagagacggatggcttgcatccatggcaacagaaataggccccaccgtcgctacagccttcatgagggctttctcttgctgagggatatccacaaaccctgtgtcgttagccagtccacagtctccttgtgccgaattcttggcctcgagggccaaattccctatag

SEQ ID NO: 444 - DNA, 616 bp, Rattus sp.
aagtcatgatattcctttattagtgctagctccttttaatttttatcagagctaaacaatttaatataaaaatgtcatttcttgttcatacagtatataaaaaagtatagtggtttggttagttttcaatagtttgcttttagccagatgtcatataagtctatgactgtaacaaatgagaacagtataaataagttctgtagtatttacacttacacagaaactagcccaaatggtgcccaagaaattaacttgagagttaaaatgaaactgattcaacattgagactttaatgctttgtaaagtttcatattatttctacactagctttggctataattctgcatagttacttataaagtgtttctgcatttcacatcacagtaggaagttttagccgtacaaaacaaacactagctcagaaaaggctccatcctcccgaacctagtttttctttgtatctggcttcttgctcttgggaacaaggaacacgttgccatctctggtctgctgcagagagtactcactgggagagtaaggtttcccatcctcatcacgtaacatgctgaagacttccagatacaaagtgctgagttttcttttcagaagatggagg

SEQ ID NO: 445 - DNA, 332 bp, Rattus norvegicus (rat)
gaggatggagccttttctgagctagtgtttgttttgtacggctaaaacttcctactgtgatgtgaaatgcagaaacactttataagtaactatgcagaattatagccaaagctagtgtagaaataatatgaaactttacaaagcattaaagtctcaatgttgaatcagtttcattttaactctcaagttaatttcttgggcaccatttgggctagtttctgtgtaagtgtaaatactacagaacttatttatactgttctcatttgttacagtcatagacttatatgacatctggctaaaagcaaactattgaaaactaaccaaaccactat

SEQ ID NO: 446 - DNA, 536 bp, Rattus sp.
atgagtttaactttctctttaaataagacaatcagggaaggggatcaagcttgaaaaacagtaacacttattttggcaagatagcaaccaaaatctaaagtacaagctattatatccaaattaaaaggcattaaagaataaaccataatattagggagggggaacacatcaaacacaagatacagtatgtctaaacatcttgaaattataatttaagggtaaaagttgaaaacttatgctgttttagattaagtgcacctttttcctgtttctcccaaatagaatcagagtttacgatttaatcacacctcaaagcttttctctcagtacaaagcaaccactaaatacacacaaaatacttatttgtcatttccctggcttatccaacgtgcaatgcacatgactcaatagactacaatttggggtgagtgtacacaaactgaaaaaccacaactccaagtttcaaaatttgctcttaaaccataggacacacaggtcatttttacttctcatgaggatgtcacactgtcattaaa

SEQ ID NO: 447 - DNA, 578 bp, Rattus sp.
agatgaagtcagatttattgttcatcatcatgtcatacaaaaatctacaaataatagatgtgtacaggaaaagagcccaaaggaatagtaaatggaggtgtaacggcgataatttaaacttgctttcccccatatattaggatgacagccatttcaaagcatagttgtgatgtcaaggcagcttttgctcgcccaccagagctggccgtttagattgaggccttcagtctcacagttctactgactcttgacaaagcttttgaggtcctcaagaaaggtgatatattcctggtgctccagggctgtgctgagctccaccaactcatctgcaaaagtgttatccacccctcggtccgcaaggaaatccattaggtggtcatacaaggcccagtccagggagtctgtgttgagtgtgtagtttgtatccctccactcagagtcaccagtggtctgaaagctcacttccttaatagagaaaatgtcactctcggcctcatcttcgtgtccgatctcgtcctcaggatagtggcagtccagtacaagggcctcgtgccgaattcttggcctcgagggccaaa

SEQ ID NO: 448 - DNA, 603 bp, Rattus sp.
cagagagtaaacggtgtcatcatatcaacttggaaacagttcagacagggcccggctgtgggcctagggtaaatgtggcttttatttcctctcagggaaagaagtaaagggtggctttcccaggtaccccaacctaaggtaaggtgggtgtgctccagaggttggggctagaattgccagatcattccgacagactcctctgtgtccactcgctggcgcttgatgcagggagggtgtaggtgagagtcattcccctggagtagcagctcagtatcaacagaggcacaaggaggtatgtgctggtattcacaaaatggaaggcagagcaggtgccctgagtgaggagcaggactgggtggccgatccacacccagtgtctgccgggtacaaggcctgactgctgtggctctcctcccaagggccccaggggcccagaagcatcactgcgtcctatggctggtcccttaaatgtccatctcaaactgtgactcttcaccacctgcccgcttatcttccgggctgctgtgcagatggctctggctggcctgcatgggaggctcatcgctggtagggctagtgacccctggaatggttggcaagtcc

SEQ ID NO: 449 - DNA, 613 bp, Rattus sp.
attagataatgccatttattatttcacacagaagttagagaccaaggttacaattattaaataccacccacccctcaaaagacagccctacttggttagaataaaaaaacaatcgatacaacaaaaaataccattacactggtagaactggggaaataacaaaaacaagacagaaacacaagacagaaaatctctgcacactgatatcaaagtggccatgacgctgggggaaagcagtcatggtcagtcaacatggacgccgactaccaagggcactgggctcagaacagccgcctctaccgaccacagttctggggctctgttgcaggatttggggctgctggtttccaagttcaggcccctggctgtgcttttggtgagggaaatgtgccaggcatctccttccattccagagagacaaaggaagacacaggaagggggcgaggaaccccaaaagctttcttagaggcccaagaaaagagagccaggcaagattctcccctgcagagagaaggctacatgagacagagttcacagcctctgggggccaacactgcatttacatggcataaattcccactgccacggtcgccaacaggaaactgagtgttga

SEQ ID NO: 450 - DNA, 646 bp, Rattus sp.
gttgaacaataatttattgagacccctccctcgcagcctctacaattcgaggttactttctccgcttgtagatcttgtttgctagttccaggaagatggatgggggcaggggcgcggagcactgctctatgagactcttgaggcggttgtaactgtcttcctcgtacttgaagaacacactccgcagatccagctcctcgtacagtgctttcacccgcgccactttttctgggtccttctgcccataattctcctctaagatctggcgctgctgaggagtggctcgtagcagacactgaaccaccagccagctgcatttgttgtcctggatgtcagtgccgacctttccggtcacactggggtctccaaagagatcaaggtagtcgtcctggatctggaagaactcgcccatctccagcaggatcttcagggcattagcgtgttccttctccccatcaattccagccatgtacatggcagccgcgataggcaggtagaaagagtagaaagctgtcttgtacttgacgatagatttgtacctcttttcagtgtatctaccaagatccacttggccctggggtgctgtgatgaggtcgagagtctgcccgatctcagtctgataggaactctgtagaaagagctccag

SEQ ID NO: 451 - DNA, 495 bp, Rattus sp.
cccaaaacaaagtaacttgaggtttatggcatacagtttaggtcaacacacatacagaagggggaagaggacatggaggtgtccgaagcaaagctgagtgacggaacacattcagttagtaggtgtctatacaaagagtggtgggacatcaggaaaagctcccatggattcatgtgcacccatctggaggtaccagattcctccatggcagatccatgtgcagagctaagggaggaggccacttctgtcattccagttttagaagctccacatcaaaaacaagagtagcatgtggtgggatgatgcctgggtgcccggtggctccataggcatagtctggggagattatcagtttggctctctggcccacactcatctgggctaccccttcttcccagcctcggatcacctcctgcttgcctagtgtaaacttaaaaggcttgtttctgtcccgagaggagtcaaatttttcccatctttaagcatccacgtgta

SEQ ID NO: 452 - DNA, 568 bp, Rattus sp.
cctagatcatggcttgtttattaaaatattggtgaaaaaataggagtctctagggctgctgacaggaggggacatcatagcactcaaggtgtctggactctcctcctggccactctccttttcctgatcccactctgtaacaggctggggctcctgctcaccagagacagccttgctcttttctttggcagggcagactgggaggaccttcttttgacctcctttgtgctgagagccttctgatgctttttgctttcaggctctacgggggacacaggagtggatccattcacctgtgacagcttctcttttttcttctgcacttttggggtcttggcagggggggtgctgggactcagggtggggttattgggagccggactcttggccacagttactccattcacctgggatggggtgttagccttcactctcttccttcttttcttgcctgtgctggggggctggtctttaccagtggcagcaggcatggcaccctctgtcactgcatcctgctgtgatgcagccttcttttctgatgtggtaccctcagaattaagtttctttc

SEQ ID NO: 453 - DNA, 430 bp, Rattus sp.
catagccttttcttcctttatttcatatccccaccacagtaacaattcctttaatttaaactaaaaaccatagacttcctgaaagggtggcagcggagggacggtggtgtcacaggcagaggaggtgggagggcactcagcgaatcgtcttgactgggctcttgaagttgctggcggcttggagctgcagctggtaggccattggatggatcttgaaaccgtagagcctgggcacaaactggttggccggccgcttgggccggtactcgggatgcaccatgaagagcatgtgagggaaaccagtgccgaagtatgcgccatccgtgtggtggtgcctataggacttgggtgtgtacacgtccatgcacttggggcagtagagcttcaccatggcctctcctgggatgtccgaaaggccgatgggaaacat

SEQ ID NO: 454 - DNA, 411 bp, Rattus sp.
aactcttaaatacttacttcccatttatttaaagttccatcagtctgtatacactatttatattaaaaacacaggaagctggggctcctagcaaaaatatacatttcagtttggagacttcggaccctgagaggagctgcgtcctcagcaccagacctgggggagggggcagggcagggcacgcagctccagcacagcctgggcctcacagggaagaccccaaggcctgatcagcagaggtgagggacagggagtgtgctagcatggagtaatctggcaggagcctacactgggcttgtcccctctccaagccacagaggaccagacggagacccacgatgtcaggcctggaagccaaggcgtacaatgcttttcgggtgggcctcggcaggatctgctgggctgggccca

SEQ ID NO: 455 - DNA, 385 bp, Rattus sp.
acaggcaaaatgggcacgtcccaaggctcaatgattatttttttcttttgccatttacagcagaataaatattttgttgctattgctacactttaaatttacattctaacctattaaatgcaaaagctactgtaaagcatatagattaagtgtaggtcccatacgtatgacagtttgttcaagactagtaggtttgtgtatctttttctttaacttattaaatggctattgtgaaagatttgtgcttgtgatcagctcttaacttaaatttttacatcacatcttccctgaaaacagtctttcttactgtccccaatgttctcaccatacgccttacactcaatgcggatttcagtgtccaaggtgaggttggtgaactgcactg

SEQ ID NO: 456 - DNA, 589 bp, Rattus sp.
tgggatgttaactcttttattaactcagggttaacattagatttgcttcactgatttcttatttgaagttgtggattcaacagacaacagctgagtccttgccacttacaggtgacaagacaaaacacattatattcagagaggagagcaggaccatatggagagagacgaggttggaaaaatttaaggcaaatgttattcccacgttaaagggaactggaccaagcagatctgcgcatttcaatgaaaatatatgaaatatttgtcaaaataattaacatcggtaaaaattagaacacgtagcttataaaatgcccacacaggcttggcagaaaaatcaatccagctctatcaacgtaggcttgtactatactgggccagagcagtgtccacccgagaacagagtcctgagtgtggaggccaaatgcacttgagaagcagttgtgtgccatggagggctggcgattagtgatttggggctggctttgcataaggaggaactgcttggccattagaggtctttcggctagccttaagtagctcctttggacccttctccacaggctctgtatctgtagatcctcgtgcc

SEQ ID NO: 457 - DNA, 527 bp, Rattus sp.
aatttctgtatttttttctgtattgtatcctcatgggacattaggggttttatatggtaagacacccaaggttttggtaaaacattatcaaatatatatccagacgattcttccctagaagaaaaaacaatctttatgcctgattttaaaaagttgaaaagaggtggatttttcctttatggtgctgaaaggaaggatggagaatgaggagaaaataaaactgtgaggatcaagactggcatcttgtctgtacttattttcaggacaactggggagaacctgctgatttccagagctgatcccagcctgggacttcgggaaatcactgagcacacagcccatgtctgccatattggttctactactcagtccctccaagactgtttcataactgagaggtcattagcaagtgcatgggtgggcagaggtgggacaaggctgaatggccaactgaggaatctctgcactttctgattcaacaaggttaggccatcacagcgagggtcttcagacataagacaggagaa

SEQ ID NO: 458 - DNA, 607 bp, Rattus sp.
ggccgcacaactttttttttttttttttttttttttttgctggttcaaaaagctttatttttacttggtccaagacttgggagaggctccagggcggttacaaagctgcctagtggctttagaggttcattcgggtggaggtgctgaggcggtcggtgcagagcagaggagggagccccttggaaggcacagaggcctagtcgtgcttcagagtgaggcgctcaaagagatactcgcccagagatgcctgggccacgccagtctgcgctggttgtggccctgccaccctacggaggttggtcaggtggttgcccatcttcttgatgagcttcacctccttatccaggaagtggctttccaagaagtcacagaggtgagggtctgtgcgggcagagcccagggcgtgcagatccaagagggcctggttcaggttcttctccagggccaaggcagcttccatggcctccagggttttaccccactcatcttgagatggcttctgcacatcctggaagagtgcacggcccccgcgttcgttctgcaacttgaggagacgctcggcgccctcgcgcttctcctcggccaattcgcggaagaagtggcctac

SEQ ID NO: 459 - DNA, 478 bp, Rattus sp.
gaataaaaagaccttggtattccatccttttgagttacagtggggaccagtgggagagggaacagttgggagtggggtgaactaggaagggctcaagatcactggaagtcgagtccgcttagttcttgtattggaagggctcgtcgccagtttcgttgaggagacacgtgcggacgatggcttccgtcaccgcataggggtcgcaattggcagaaggccgacggtcttcaaagtaacccttcttctcctggccgacaatccggggaatgcggatactggcgctgcggttggcaacgccagcggaaaagtcgttgatgttggaggtttcgtggaatccagtcagacggcgggcgttgtccaggccccccttggggtcgtaggcacggatgtggtactggtgcctcttgctcagtttatcaatggcctcctcaatgcacctcaaaccattctccttccgcatggccttggtcctcgtgcc

SEQ ID NO: 460 - DNA, 454 bp, Rattus sp.
gggtccctgtggaacaatgctataccctctactttgacttaatcgacctcttcaatggtggggcctgaagaagcaccaccagatggaggagctcctccaccagggaagccaccaggcatcaatgtcaaaagtaacctcaatctgaggaaccccacggggtgctggaggtatgcctgtgagctcaaacttcccaagcaggttgttgtccttggtcatggccctttcaccttcatacacctggatgagtacacctggctggttgtcagagtaggtggtgaaagtctgggtctgcttggtgggaatggtggtattgcgcttgatgaggacagtcatgactccaccagcagtttcaatcccaagggaaagaggagtgacatccaagagcagcaaatcctgaacattctcagacttgtctccaaatagaatggctgcctggacagctgcaccataagca

SEQ ID NO: 461 - DNA, 512 bp, Rattus sp.
ccacgcctctcttcctttattgaggcctagagcccaaatcctgcaagctgggctccaggcccaggccttcctcagggcccacagagcccacgaagcccagggggcacagaagggaaccccctacacacaaggggatccccaacctgccgccccacctggcacacaggtcagaagcccctttggggctggtatcagatctagcttaatccttcttgctcccgtgttgctggctgtggaacttctgatgcaccactcggagggtggtgaaaaaattgccaaggaagaggaggaggaaggggaggcctcacatgagcacctgccactccttgcactcagggtgccgggccaagttaaacaatgtcagcgcattaaaaagctgccagaaatgtccaaagaagaggaacggaagcaggaaggtgaggcctctccacatccaagactgaaagccctccacagggaggtccatggtgtgtcgttcgcccagggctcgcataactagttagcatgccaaa

SEQ ID NO: 462 - DNA, 387 bp, Rattus sp.
catatatagctgtgttcagacacatcagaagagagcatcagatctcattacatatggttgtgagccaccatgtggttgctgggatttgaaccaggacctctgtaagagaagtcagtgctcttaacactgagccatctctccagcatttgttttgttttaaaacaatgaccataagaggaatggtggacttctagcttgttctgcctacagtaacaaaagcacatcacacccccagctcacaaacctgtgtgcaatgtcactaccaccacacaacggtactgcgttacactgttggaaaccgcatttccactcagtgcagataaaagcaataggaaacacccagcccagagtcagattattttctgttgtgaagtcaggcctcgtgcc

SEQ ID NO: 463 - DNA, 646 bp, Rattus sp.
aataaagacaagtgttcagatttatttggaaattcacagtttctaatggtactacagctctgtagttacatatttaaaaccctcttttcacaacacatagtgacttcccactctggctctgctggcatctggacttcaagggcctgctgtaccatcaggccctattgctctgaatggctaattgtgcagactggaaggggtaaaattcatttcctaaaacgtactgttcacctaaagcagcaacttaaagaaaaaggccttaaataaatcacattacaaacaacaccaaaaaaggtattagacaaatttaaaaacaattattaacaaaagtgctcaataagttataacttaaattttacaacacaaaatggtcaattctctcaaaaacacatttcactttcactcatccctgtacaatccacacatcaagaactcaatttactcagacagacactgccaattacttaagggggggggtggggggacaaaaagtaaatgaagacaaacgctgacaaccacatacacacatatctgcacattgtagccaacaaaagcaaacacaaaggaatcataatcctactagacttcaccaattagactgaatcaggcctgacgtgctcactggctggctgtgactatgtacaaa

SEQ ID NO: 464 - DNA, 625 bp, Rattus sp.
agaaatgacaccacagggtggactttattttaaagctcacaaggtgttcacaatgatcacatgatccacacgtctcccgtgtcacacctccacgggacagtgcatgtatggtgatagttacagccctgcttcgcatgctgctacggttcactagctgttgtattcttggtaataataaagcaaatcactctactggacagacttaatttggaaagcccttatgcagatcagactcagtctcatatgaacaaccccggccacacatgcggaaatgaagagcaaatgcagaagaacacagaaaaccccttggcaagaacagctgctgcagactgagcccagcgctgtcagtgcagttcacgtcctcagaagacaaacgacctccctcctcagcatatgagcagcaatactgtacagagctcagtggggtcccaactccacaggagcctgtcaccaaagtcactctcatttagggtcagagactacagactcaagctttttcttttttccctcataatacacaaaatgtctagacagtctttaaaaaaaaaaaaaaaggaagaaagaaaatataaatagactcagtctgtcatacagaatcacatacaatggcaaacacatttcatga

SEQ ID NO: 465 - DNA, 472 bp, Rattus sp.
aaggcaaggtctctgtcattagggctgggagagatggtacagatcaagccaaacagtgaaaaataaggcaaactgtagcttcgggttttgagcctggcaccaggaaggcctcttcttgaggaagagggggcaggcagtggcaaatcagcagacgagatgcaaatggagtaacaatcacagttagtggggtaacgagatcaggcggtaaacccttaaagcaacacccaaggtccacgtctttgcatgtgcagggcacaactccagcagcagtttctgggtttgggggtttgttacttttccgactttccccaccccctaaaagacacgaagacgagctcatgaagagatcaaggaagggacgtcttctggctgcgctgggcaagggttgggtgacttccgggagcacttgtctaccttccctgtggctggccgagtcctacaaacgtttgtaggtgcccaggagcgctttgca

SEQ ID NO: 466 - DNA, 430 bp, Rattus norvegicus (Norway rat)
ttaagaaagaaaaaataaaaatataaataaaaaattaaaatttttaaaataaataaaaaaaaaaaaagggggaacccgtacacccacaaagagtgaaaaagggctatcactaaccaaaaatctcccacaagaaaaaacaaaaaaagggggaggccccccccaaccaaaatgcgcggtggtaacccaaacttaagccaaagtcaggagagaggctttaaaaaaaaaaaaaattcccatttgcaaaccccacccttggtggattttttcccaaaaacccccccgaaaaaaaaaaaaaaaccttttttcttattcccaaaaaaaaaacatatctggggcgaaaaagcagaaccccccccttgaaaacaacccccccaaaaaaatggaaaaaaaaaagctccctttcccaaaaaaaaaaaaagggccatggaac

SEQ ID NO: 467 - DNA, 450 bp, Rattus norvegicus (Norway rat)
ttcattattatttttatttttttatatttttctatttttcattttcatttatttttattttacttttctgtatactttattaatatttttatttatatttggacagagagaaaacccccgggcaactaaaaaaaaaaaaaaaaaaaatttaaaacaaaaaaaagccgccggggataaaaaaaaaaacaaaaacaccggtggaaaaagcggggcgccccaaaaaactacaaaaaaaacaatggcccagtcaggaggaaggggcacccagcaaaaaaacctgggcggagaaaaaaagggacccccccaacaagaaatggggtgtggcaccaccacggggcgacgaaaaacagaagggcgaagggtgacccccacaacaaaaaaaacttgtactccaacggggggaagaaaaaaaacaccaccatgggcccggggaccgcggatcttattctt

SEQ ID NO: 468 - DNA, 402 bp, Rattus norvegicus (Norway rat)
ttatattgctgaccttcatttttatttaaatatattcatcttgagaggaaactacacaggaaatattttatataaatgtaaacatgcatgtctacatcagaattaagcaaaataaattttgagtcacaagattttaaatatcattaaaggacaccaggaattgaagacggaagtgacaggaaacaagaacacagatcctaacccttgagttggtcttccaagctactgggtaaggcctgagtttcaaaaagtttatgttccttgccaagtggaaatatccagtttggctgttcttaatacatatctacaaaacaaacaattctcttttaaaataattaataaatatgacacacacacatacacacgcacacacacatacacatacacacatacacacaaact

SEQ ID NO: 469 - DNA, 448 bp, Rattus norvegicus (Norway rat)
  misc_feature (426)..(426): n
ttacaaaaacaaactttattttgctatctcacaagtcagccaggagattgccatggtatatgtccctgcttctggtaacttttaccagacacaaacaggatcccttcacgtcctcacgggagctcaggctgcctctgccatgctgggggcttcccaaagcagccagagagatttctctgcaccacctcagcctctacagaagttctggctggggaaagactcgctgagcctccgtggctaaccaggctttctgacccaagatcaggcacggtggccctcggctgggcttgctgaccgaacatccagacagaggtttctcctttggcagggcctgcctcagagccaggtcccatttgctgcacagtccaagaagccatcatctcaggagccttccccagacttcactgaaggctgtacagccacctnctcgatctgccagcgacacatg

SEQ ID NO: 470 - DNA, 231 bp, Rattus norvegicus (Norway rat)
ttgacttacaacagggccctccctttgttacagacaagggagggtttgcttgaattaaaccaccctcaatacccaccctggccctaactaaggatgggctggccagccagccagccacactcacttttaacaaacaaactttctataccgatcgagggactacctgctacatgcatggctgacagaccatttttactatcgaaagaaccaacctgacggaggcttacttaa

SEQ ID NO: 471 - DNA, 393 bp, Rattus norvegicus (Norway rat)
ttgatgctgggaattgaacacagggttgtaacgctctatgacagctacagcaagcacgtctcatcctcagctgttcaacttaactgcaaggccagtatgttcctgtcgtctcaaagctgcacctggggaagcatgagcgatggcctcagcctgcagcaagtggtggtcatgcctgtgcacaacaagctggagcggagattggtggggcttgcacacccctttcatccgcattgctttaaatactggacacagcctttgcacagtggcccctgtggccacctatgaacactgcaagtgtagtaaccggatgtgtgtgggcaaacaccttctaaaccacaccagtgtacccgatagccagagcctaggatcacagtatagagaggtgactcaggg

SEQ ID NO: 472 - DNA, 287 bp, Rattus norvegicus (Norway rat)
ttggtctccatggacagcatttattaggcgccattctcagtgtgaagacagatgggcaggggctgctgaggggggccagggcagccacagcctggggacttaggggctgcccgggtgggtgtggggatgtcacccacacatattgcatattctgtggcagtgtgcccaggcataaggcattggggaagcagagaggctgcctgcagtgggagggggtgagacaggaagtgacagtggccttctagttccctaggcaagaccctacaagagaccagcagtcccccatg

SEQ ID NO: 473 - DNA, 541 bp, Rattus norvegicus (Norway rat)
ttacctcagaacaaataaataaagaaaatgtatttacattagttcatcattggaaaatctggcataactgaacgatgggaaaccaggactgtgtcctagtctcttgggtctagacctagctcacagggcaggcatgggcaccttacaaccttctgtagaaacggagagaggtggcatgggtcttgagcaggttgagcagcagcgtcgacgcccctcagtgaagagaatcccagcgtcccaatcaaggagctcctgctgagggcatgggcttcgtctaaccatgttaagttcacgtagacatctgtccaagttaaacaaagtccttccattcagcagtacataggacaaggagccatggtcaggaatggcaacctcttgccacaaactatgtgacaagagggatgtggaattcatgtgtgtcaaatatcaggggcctcctgggtggttttgggtccctgttggctttgtgtagcagtttgaagagaccagttccaatgttcattgggattcccatgatgatgcactcagacacaccacacac

SEQ ID NO: 474 - DNA, 401 bp, Rattus norvegicus (Norway rat)
ttagactaagacaatgctccggctttaatgtatgaaaataatacccatgttgtctaatttgggggtcatacattagaagtgtaaaggtctgcgtctgcccgccgtctagttgaagtacgtgagcacaatcatttggatcggctgtctgcacacggggcagggcttattcctcttctttagcttctttgcacacgtgaaacatgacatcaggtgtccggttttgccgtgaacaatgcaaccatttttaggccgcccctggcaaatcacacatggctcgatggcgttcagagagaagctggattccatactttcctctttgtcttgtgtgtcctccttcaactctttgccactttcttggctgctgtaaacaatgctactggaagtcgacggctgggaatagt

SEQ ID NO: 475 - DNA, 437 bp, Rattus norvegicus (Norway rat)
ttgggagaagagtctgaaaaagtaaactttaattaaaaaaaaataataataatacaacttcaggttcgtgctaggctctcccacttggccttttacagactggtcggttttccactgaattcggagaagctgaagatgtaccacagaggacacagagcaccatcacttctacaggcaaacagctcgtgcacaggcttgaccaatgtccgtggctcgagtgactaagcggcaaggctggtttcccggaagttcaaaacgccagcttcttcatcagcaggtagactcgggagtccacctcaaatccatgcaggttgttggcgtccccctgaagcctcatgaggaggccgccataggacacatacgcagagagacgtgtggctgcttccgttgaggtctcgtccccttcgatcctgtacactttcccatacattacatac

SEQ ID NO: 476 - DNA, 403 bp, Rattus sp.
  misc_feature (220)..(220): n
  misc_feature (232)..(232): n
  misc_feature (235)..(235): n
  misc_feature (320)..(320): n
  misc_feature (357)..(357): n
ctttgctgttcacagacctagaacagggcttgtaatccagacagcatcaccccactgtgcacaggaatgcatgaagcacaatggctgtttcttcctccagaaaggcacttacagtttagcttggcccaaaaaggcaggcgaaactgagacaccagtactcaactcacaccttggagctgaagggccagttaaggtggctctagccatacagccccacctncccttcctctgnctnctccagctgtggcccatctggggacaacctgggtccatctcccttcggtcagaccgtgggaggagagacttgggctgcaatcctncctcaaccaggggatgtagcaaggattccccaggggncacaaagtcgctctgaaaggcttcccctggcggaggaggacagcgg

SEQ ID NO: 477 - DNA, 352 bp, Rattus sp.
  misc_feature (189)..(189): n
acctcaggatgtgactttatttggaaatggccactccagatgaaggtggggctctgctacagtagacagggtgagccccaacccaaagactgggatccttgtacagaaggtaagtttggagaccgacgcagtggagatgaaggcaaagatggagagatgtttgtacaagccctggggtacacacaagtntcagtgaccatcagacccaagaggattcactcttctagcttcggagagaaccagcccactgacaccagaccttggccttgcaaattccataactgtaacaatgccacgtgctgttagaagagcctacgtttagtactagttacttatgtcagtgctaggacta

SEQ ID NO: 478 - DNA, 341 bp, Rattus sp.
tttggtgtcatttcactcagaagtttaatgagataggttgttgaagacgacaaagacgactcccgggagacaaaccccattgccacaaacatggaattcgggagtaactgtggctcctcaggcctccctcccacctcagcacccactgacaaagagggatcagtgtcgggaacaggacaaggaggtgccaggaagatgaaagaatggaaaacgtgaacctgcaggctctggctaggacggaaacagaaaggcagtgcggctgggtgagcaccgacactgtgggccgacgaatgagtatgtcaggggttacacagggaaggaaggacggacgtgggagctat

SEQ ID NO: 479 - DNA, 349 bp, Rattus sp.
  misc_feature (9)..(9): n
  misc_feature (109)..(109): n
gtgttgggntgtttattaacaaagtgagcaaggggcttcaaggactggtggatccaggacgcttctttttcttccttctttggagagcaccttgtttctggtccaaatnagggagctttcgcttggcagctgcctccaaagacgcccaaagttcatctgtctctgtgtcttctgggggcactaggttgggctcttgaggttcttggggctcatcctcccagttatcccggcctgacaggagaaggcagttcagttgagacttgagataaaccttatgctctagccctcgtggattgcggatcctgtgtatcctcaggactctgtctaagccacaagatgctaacagggg

SEQ ID NO: 480 - DNA, 363 bp, Rattus sp.
  misc_feature (7)..(7): n
gtttgtnctttttttcagagctggggaccgaacccagggccttgcgcttcctaggcaagcgctctaccattgagttaaatccccaaccccaagactttcttttaaaaagacagtactctacggattgaaggattacaatccttcaatcctgatgaactctccatattactggaaccacacactggagcactactgggagccagtgaagttggtgcctcaggatatggggctgttcccctcagccatgggttatctgtgaatatgacccatcacagtctgaatttatctgggaagaaaaagagctcataagtctgtgtacacacttaacacaccacagcacttagactgcattaggtattaggg

SEQ ID NO: 481 - DNA, 422 bp, Rattus sp.
  misc_feature (34)..(34): n
  misc_feature (81)..(81): n
aaagatttattcatgcagtttatgtatatgagtnctgtcttcatacacatcagaaggaatcagacctcatagatggttgtnagccactatggggttgttgggaattgaacttaggacctctggaagaactactgggtgctatcactcagacccaggtttttgggagagacagtgtcctgtgtagcctataactgattaggaatttgaatctcttctgcctccacctaccacatgctgggatgactgctaagagttgtagcttccagaaaggatgaacattaagacctttgtgcttctgtaacagaagttaaagaaccatgggaacattactttggtttcaacaggatggtgtttgttcaaggctgagagcctcaagtgagcaatttagcagagtctgtatacaaacagatttaccactgggg

SEQ ID NO: 482 - DNA, 151 bp, Rattus norvegicus (rat)
gtaaatctgtttgtatacagactctgctaaattgctcacttgaggctctcagccttgaacaaacaccatcctgttgaaaccaaagtaatgttcccatggttctttaacttctgttacagaagcacaaaggtcttaatgttcatcctttctg

SEQ ID NO: 483 - DNA, 569 bp, Rattus sp.
  misc_feature (77)..(77): n
  misc_feature (91)..(91): n
  misc_feature (301)..(301): n
  misc_feature (540)..(540): n
ttcctggttttggacagggacttcccatcttctcttccaccctttctctatggtccctggcagtagctccgcatgtnccctaccttttctnactctggccctttgagtgtggcaaatcccatagctctgaccctccaaaactgttcgaggagaaggaggaagaggaggaggaggattcgagtcttctggtaagcggggagagcgcctcctcagacaggtctcagctcactctccgtctctttagttatgcttgctcttaattttcatgactttgttgtccagcatgctctgagcgtttgtnagatgcttgatggcatcaaacacaaggatgcccggtatcaccaaccatatggcattcatgataacgaagtaggaaccagaaataaagggggtgacctagctctccatgctggaatccatcgcggagttcggtcaggaagtacagcacatccccatatatctggcccacagacaccacaagctgtaggacaaagcggaagggtttgatgacggagaaaggcgatcaccacccataggctnagtgggtccccagagacaagctgtgacaa

SEQ ID NO: 484 - DNA, 2190 bp, Rattus sp.
gctgccagctacaggcagtggggaaatccacagggcagcagctgtattgtagacggcccttgctcactgcctgcctgcagccagctctgtacaaggaacaatggccctgaggacaggaggcccagccctggtggtgcttctggctttctgggtggcactgggcccctgtcacctgcaggggacagatcccggagcgtcggcagatgccgagggcccccagtgccccgtcgcctgtacctgcagccatgatgactacacagatgagctcagcgtcttttgcagttcaaagaacctcacacatctgcctgatgacatcccagtcagcaccagagccctgtggcttgatggcaacaacctctcttctatcccctcagcggccttccagaacctgtccagcctggactttctcaacctgcagggcagctggctgaggagcctggagccacaggcactgctggggctgcagaacctctactatctgcacctggaacggaaccggctccggaacctcgccgtgggcttgttcacacacacaccgagtctggcttcactcagcctgagcagcaacctcttgggccggctggaggaagggctgttccagggcctcagtcacctttgggacctcaacctgggttggaacagtctagtggtcctgcctgacacagtgttccagggactgggcaacctccacgagctggtgctggctggcaacaaactgacttacctgcagcctgcgctcttctgtggcttgggcgagctgcgggagctggatctgagcaggaacgcactccgaagcgtcaaagctaacgtctttgtacatttgcccaggctgcagaagctgtacctggaccggaacctcattacagccgtggcccctggtgcctttctgggcatgaaggccctgcgttggctggacctgtcgcacaaccgcgtggctggcctcatggaggacaccttcccaggcctgctgggcctgcacgtcctgcgcctggcacacaatgcgatcgctagcttgcggccgcgcactttcaaagacctgcacttcctggaggaactgcagctgggccacaatcgaatcaggcagctcggggagaggacattcgagggcctggggcagctggaggtgctgacgctcaatgacaaccagatcactgaggtcagggtgggcgccttctctggccttttcaatgtggcggttatgaatctctccggcaactgtctgaggagcctcccggagcgggtgtttcagggtctggacaaactgcacagcctgcacctagagcacagctgcctgggtcacgtccgcctgcacacttttgctggcctctcagggctgcgcaggctcttcctcagggacaacagcatctccagcatcgaagaacagagcctggcagggctttcggagctcctggaactggatcttactaccaaccgcctcacacatctgccccgccagctcttccagggcctcggccacctggagtacctgcttctctcctacaaccaactgacgactttatccgcggaggtcctgggccctctgcagcgggccttctggttggatatctcacacaaccacctggagacgctggccgaaggccttttctcatctctggggcgcgttcgctacctcagcctcaggaataactccttgcagaccttttcaccacagcccggcctggagcgcctgtggcttgatgccaacccctgggactgcagctgtcccctcaaggcgcttcgagactttgccctgcagaaccctggtgttgtcccccgctttgttcagactgtctgtgagggggacgactgccagccggtgtacacctacaacaatatcacttgcgctggccccgccaacgtctcgggcctcgacctaagagacgttagtgaaacacattttgtgcactgctgacactggctacttactggcccggtctggccgaacactgtctcatggccaggacggtgtctcattgttaacagaataagctggctctcaaattcctacccatctctaggggacaggtcctggctgctcacttcctggaagcaggctgtactggaagctatgtggcctagaaagggtgggctcaggccaagtgtccaagggcccaaaggagggaggtgctcgctgaatttaagcatattagtcagcggaggaaaagaaactaaccaggattccctcagtaa

SEQ ID NO: 485 - DNA, 397 bp, Rattus norvegicus (rat)
tgcagctgtcccctcaaggcgcttcgagactttgccctgcagaaccctggtgttgtcccccgctttgttcagactgtctgtgagggggacgactgccagccggtgtacacctacaacaatatcacttgcgctggccccgccaacgtctcgggcctcgacctaagagacgttagtgaaacacattttgtgcactgctgacactggctacttactggcccggtctggccgaacactgtctcatggccaggacggtgtctcattgttaacagaataagctggctctcaaattcctacccatctctaggggacaggtcctggctgctcacttcctggaagcaggctgtactggaagctatgtggcctagaaagggtgggctcaggccaagtgtccaagggc

SEQ ID NO: 486 - DNA, 832 bp, Rattus sp.
ccggggctcagaacagactctgccactcagatcaccatgtacagcttcatgggtggcggcctcttctgtgcctgggtggggaccatcctgttggtggtagccacagcgacggaccattggatgcaataccggctgtcagggtcctttgcacaccagggcctgtggcgttactgcctgggcaacaagtgcttcctgcagacagagagcatcgcatactggaatgccacgcgggctttcatgatcctgtctgccctgtgtgccacctcgggcatcatcatgggtgtcctggcctttgcgcagcaatccaccttcacccgcctctccaggcccttctctgctggcatcatgttttttgcctccacccttttcgtcctgttggccttggccatttacaccggagtcaccgttagtttcctcggccgccgctttggggactggcgcttttcatggtcttacatcctgggctgggtggccctgctcatgaccttctttgcaggaattttctacatgtgtgcctaccggatgcatgagtgccggcgcctatccaccccacgctgagccctggggcgaaacttgcagccggaagttacaacgaggacattgaagaggaaggggaggacctagaggccggaagtcctggttcctgagggaatgagggggctcagtcctgtattctagcccctgacccctctgtcctgtgtggggaggaaaagtagggtcaagtgggagggaactgagacgaagacataagcctccacctgcactgaggggtggtagaaaacagaaactcctttagagagtgatttgggaatctaataaaactgatgaggaa

SEQ ID NO: 487 - DNA, 351 bp, Rattus norvegicus (rat)
tggccacacaatttaagtgcctagtcaccatccaccgagcacagagattgaggctggtttagcaggttacggttcagttttgcttgtctccccgggcaagagaaggggacttaggaggaaggtgatgaggtcccagggactcctgtcacccaggactctccctcttacagaggaaagacctagtagcttaaaaggtctgggctgtgtgggggtggggcggtcataccactccctcaaccatgccctatgcctgtaagcccccatcaccacctccgtgcagggtcctagctggctgggtcctcttctagccttgtgcctgctccttttctgtatcccttactctgttgtctg

SEQ ID NO: 488 - DNA, 436 bp, Rattus sp.
actttattttggactgtggtacggccaacaagaccactctgtatgcaaaagcccaacatggctgtaactggagatgaaactgatgaggagactgaccttgccccaagtcacatggctgctgccacaggtgacatgccaacttaccagatccgagctcctactactgctttgccacaaggtgtggtgatggctgcctcaccaggaagcctgcacagtccccagcaactagcagaagaagcaactcgcaagcgggagctgaggctgatgaaaaacagggaagctgctaaagaatgtcgacgtcgaaagaaagagtatgtcaagtgtcttgagagtcgagtcgcagtgctggaagttcagaacaagaagcttatagaggagcttgaaactttgaaagacatttgctctcccaaaacagattagtagaaatatttaacta

SEQ ID NO: 489 - DNA, 704 bp, Rattus sp.
cgccaccgcgtctccttgctgcttttgtgctctcccgctcgccatggccagccttaaggacctggaagggaagtggcgtctggtggaaagccacgggtttgaggactacatgaaggaactaggagtagggctggctcttaggaagatgggtgccatggccaaaccagactgcatcattaccctcgacggcaacaacctcaccgtcaaaactgagagcacggtgaagacgaccgtgttttcttgcaccttgggagagaagtttgatgaaaccacagctgatggcaggaaaactgagacggtctgcaccttcacagacggtgccctggtccagcaccagaagtgggaagggaaagaaagcacgataacgagaaaactgaaggacgggaagatggtcgtcgagtgcgtcatgaacaatgccatctgtactcgggtctatgagaaggtacaatgaggactggctaactcgtcatcctggacagcagtcagctggctgagggaataagctcaattcaatgagcaggtcgtacagaaccacactgcttcacttctttggttttatttttcatgacttttcatcatagacactttacccgaaacccatgtcagaccgttggtttacccaggatcattcctttggttagtaaataaatgcgtttgtgctaaaaaaaaaaaaaaaaaaaaaaaaaaaaaaaaaaaaaaaaaaa

SEQ ID NO: 490 - DNA, 746 bp, Rattus sp.
ccatgtattccagaaaggccttgtacaaaaggaaatactctgctgccaagacaaaggttgagaagaagaagaagaaagaaaaggtccttgctaccgtcacaaaaacagttggtggggacaagaacggtggcacccgggtggtgaagcttcgaaaaatgcctaggtattaccctactgaagacgtgcctcggaagctgctgagccacggcaagaagcccttcagccagcacgtgaggaggctgcgctccagcatcactcccgggactgtcctgatcatcctcactgggcgccacaggggcaagagagtggttttcctcaagcagctgggcagtggcttgctacctgtgactggacctcttgcctcaacagagttcctctgcgtaggacacaccagaagtttgtcatcgccacctctacaaaagttgatatcagcaaggttaaaattccaacacctgactgatgcttacttcaagaagaagccacttcgcaagcccaggcatcaggagggtgagatcttcgacacagagaaggagaaatacgaaattacagagcagcgaaaggctgatcagaaagctgtgactcgcagattttgccaaagatcaaagctgtcccccagctcgagggcctacctgcggtctcagttctccctgacgaacggcatgtaccctcacaaactggtgttctaattgttaacaacctaataaaactgcttcataaagaaaaaaaaaaaaaaaaaaaaaaaaaaa

SEQ ID NO: 491 - DNA, 1129 bp, Rattus sp.
cagaccccctcgtaggacagactgttagaacaggctgtgcttcatctctgtttagagaactcaagcaattgctgccatgccggggaagccagtccttcactacttcgatggcagggggagaatggagcccatccggtggctcctggctgcagctggagtagagtttgaagaaaattttctgaaaactcgggatgacctggccaggttaagaagtgatgggagtttgatgtttgaacaagtgcccatggtggagattgacgggatgaagctggtgcagaccaaagccattctcaactacattgccaccaaatacaacctctatgggaaggacatgaaggagagagccctcatcgacatgtatgcagaaggtgtggccgatctggagttgatggttctctattacccctacatgccccctggggagaaagaggcgagtcttgccaagatcaaggacaaagcaaggaaccgttacttccctgcctatgagaaggtgttgaagagccacggacaagattatctcgttggcaacaagctgagcagggctgatgtttccctggttgaacttctctaccatgtggaagagatggacccaggcattgtggacaacttccctctgctaaaggccctgagaaccagagtcagcaacctccccacagtgaagaagtttcttcagcctggcagccagaggaagccttttgatgatgagaaatgtgtagaatcagcgaagaagatcttcagttaattcagtcagctatggatacactgtacccacaaagccagcctcagaaagctctgcaacaatgaagtattttgactaaatgttgaccgtacttattgggagggtaacatgttttctaaggcttctgtgttaattcatatagacatgactcatgaggaattgctgggatgccatctagttgagttaaaacctcaatctcgatcacttcctcggatattttcttaatgttcaataaaacaaaacaagcttcttagacgctggagtatccaaacattgtcatgaaatagctgtcatatccttgtcaaacagcgtcacgtagaaaccctcgtgtcaaactctcttacgcaaaagtaatctttccttatggagagtgtcctttctctcgtgccg

SEQ ID NO: 492 - DNA, 1747 bp, Rattus sp.
gcagctgctccgctcgctctcgaacctccgtcttcagctcactgccttcactccagacttcaccatgtccgtcagggtgactcagaaatcctacaagatgtccacctccggtccccgggccttcagcagccgctcgttcacgagtggacccggtgcccgcatcagctcttccagcttttcccgggtgggcagcagcagcagcagcttccgcggaagcctgggcggctttggcggggctggtgtcgggggcatcacggcggtcacggtgaaccagagcctgctgaaccccttgaagctggaggtggaccccaacatccaggctgtgcgcactcaggagaaagagcagatcaagaccctgaacaacaagttcgcctctttcattgacaaggtacgcttcctggagcagcagaacaagatgctggagaccaaatggagcttgctgcaacagcagaagacatccaggagcaacatggacaacatgtttgagagttacatcaacaacctccgtcggcagctggaagccctgggccaggagaagctgaagctggaggtggagcttggcaacatgcagggcctggtggaggacttcaagaataagtatgaggatgagatcaacaagcgtacagagatggagaatgagtttgtcctcatcaagaaggatgtggatgaagcctacatgaacaaggtggagcttgagtcccgcctggaaggactgaccgacgagatcaacttcctccggcagatccatgaagaggagatccgtgagctgcagtctcagatctcagacacgtctgtggtgctgtccatggacaacagccgctccctggacatggacagcatcattgctgaagttcgtgcccagtatgaggagatcgccaaccgcagccgagctgaggccgaaaccatgtaccagattaagtatgaggaattgcagaccctggctgggaagcacggggatgatctacgtcgctcgaagacggagatctctgagatgaaccgtaacatcagccgcctgcaggcggagattgacgccctcaaaggccagagggcaaccctggaggcggccattgctgatgcagagcagcgtggggaactggccgtgaaggatgccaatgccaagctggaggatctgaagaatgccctgcagaaggccaagcaggacatggcccggcagctgcgcgagtaccaggagctgatgaacgtgaagctggcgcttgacatcgagatcgccacctaccgcaagctgctggagggcgaggagagcaggctggagtctgggatgcagaacatgagcatccacacgaagaccaccagtggctacgcaggaggactgagttcatcctacgggggactcactagccccggcttcagctatggaatgagctctttccagcccggcttcggttctgttgggggatccagcacttatagccgcaccaaggctgtggtcgtgaagaagattgaaacccgagatgggaaactggtgtctgagtcttgtgacatcatgtccaagtgaatggccactgaagtcattgccagcctgaggtcctgcagctgctcaggggtcaaggggagacagctgtatggcagagtgcagggaactagggaccagccagagtaccagccctaaacctctggccaaccttgggaggaatttctatctgggatatgccaatgcccaactcaattgtattttccaaaataaagcctcagtggctgtaaaaaaaaaaaaaaaaaaaaaaaaaaa

SEQ ID NO: 493 - DNA, 1000 bp, Rattus sp.
caggagcatctggacagtacaccacttgtgatggagacttctatgcctgaatactatgacgtttttggtgatttccatggatttttaatggataaacggttcaccaaatattgggaagacgttgaaacattcttggcaaggccagatgaccttctcattgttacttatcctaaatctggcagcacatggattagtgaaattgtggatatgatctataaagaaggtgatgtggaaaaatgcaaggaggatgcactttttaacagaatacctgacctggagtgcagaaatgaagatctaataaacggaataaaacaactaaaagaaaaggaatcgcctagaatagtgaaaactcacctgccagctaagctccttccagcatcattttgggaaaagaattgcaagataatctatctttgccgaaatgccaaagatgtcgtcgtttcttattactactttttcctgatcatgaaaagttatcaaaatcctaaatctttttctgaatttgtggagaaatttatggaagggcaagttccgtatggttcctggtatgatcatgtaaaatcttggtgggagaagagtaagaattcacgtgttttgtttatgttctatgaggacatgaaagaggatatccgaagagaagttgtgaagctgatagagttcctggagagagacccatcagcagagctagtagacagaatcattcaacatacatcattccaggagatgaagaacaatccatgcatcaattattcaatgctgccagagaccatgatagatctaaaagtatcgcctttcatgagaaagggaattgtaggagactggaagaaccacttccctgaagccctgagggagagatttgaggagcactaccagcagcaaatgaaggactgccctgtgaaatttagagcagagccctgagacaattccttgtgtctgaaattggagtagtctccaatttatccttcagtttttcttgttttgaattcagtagaagtagaag

SEQ ID NO: 494 - DNA, 867 bp, Rattus sp.
tggtagtggtttccgcgacaggcaggtgcgactgctttagcccggcctgggctccacggctgcctggagggtctctgcagtgcccaccccttctcctccgggaccccacgccagcagcgaccctgagccagcagccggagcgaccggcaatggcggcctcgacggcctcgcaccggcccatcaagggaatcctgaagaacaagacctctacgacttcctcggtggtggcctcggccgaacagccccgccggaccgtcgaagaggagctgagtaaaaagtctcagaagtgggatgaaatgaacatcctggcaacatatcatccagctgacaaagactacggcttgatgaagatagacgagccagacactccataccacaatatgataggtgatgatgaagatgtctgtagtgattcagaaggcaatgaagtcatgactccagagatcttagcgaaaaagttagctgctgctgagggctccgagccaaagtttcggactcgggaacaagaaagcagtggagaggaagacaatgacctctcccctgaagagcgagaaaagaagcggcagtttgaaatgaaaaggaagcttcattacaacgaaggactgaatattaaattagccagacagttaatttcaaaagacctacatgatgatgacgaagatgaagaaatgtcagagactgcagatgcagacagcatgaatattgaagagtcaaatcaaggatctactgcaggcgaccatctgcagcacaaatcacaaagttcataaacgtgttcatcagtgcagtcgttgtcaaatacaaaccttgttacttataccacactgcttcttgttctctacgactcgtgactatgtaccaaaatacaca

SEQ ID NO: 495 - DNA, 887 bp, Rattus sp.
atggagaaaatgtcccgacagctccccctgaaccctacctttatcccgcctccctacggcgtgctcaggtccctgctggagaacccgctgaagctcccccttcatcctgaagacgcatttagcaaagacagagacaaaggtaagaagctggatgatggtagcaacagcccgaccgtcccccagtcggccttcttgggacccaccttatgggacaaaacccttccctatgacggagatactttccagttggaatacatggacctggaggagtttctgtcagaaaatggcatcccccctagtccatcgcagcacgaccacagccctcaccctcctggtttgcaacctgcttcctccactgctccttcagtcatggatctcagcagccgggccacggcacccctccaccctggcatcccgtctccgaactgtatgcagaaccccatcagaccaggccagctgttgccagcaaaccgaaacacaccgagtcccattgaccccgacaccatccaggtcccagtcgggtatgaaccagacccggcagaccttgccctctccagcatcccggggccagaaatgtttgaccctcgcaaacggaagttctccgaggaagaactgaagccacagcccatgattaagaaagctcgcaaagtcttcattcctgatgatttgaaggatgacaagtactgggcgaggcgcagaaagaacaatatggcggccaagcgctcccgtgatgcccggcggctgaaggagaaccagatcgcaatccgggcctcattcctggagaaggagaactcggccctccgccaggaggtggctgatttaaggaaggagctgggcaaatgcaagaacatacttgccaagtacgaggccaggcacgggcccctgta

SEQ ID NO: 496 - DNA, 970 bp, Rattus sp.
gcttcgccacctgcccgtggctcccaagctggggatgtgtacagctttggtatcatcctgcaggagattgccctaagaagtggggtcttctatgtggaaggtttggacctcagcccaaaagagatcattgagcgtgtgactcggggtgagcagcccccattccgaccctccatggatctgcagagccacctggaggaactggggcagctgatgcagcggtgctgggcagaggacccacaggagcggccaccctttcagcagatccgcctggcgctgcgcaagttcaacaaggagaacagcagcaacatcctggacaacctgctgtcacgcatggagcagtatgctaacaacctggaggaactggtagaggagagaacacaagcttatctggaggagaagcgcaaagctgaggccttgctttaccagattctgcctcactccgtggctgagcagctgaagagaggcgagacagtccaggctgaggcctttgatagtgttaccatctacttcagtgatattgtgggctttacagctctttcagcagaaagcacacccatgcaggtggtgactctgctcaatgatctgtacacctgttttgatgctgtcatagacaactttgatgtgtacaaggtggagaccattggtgatgcttacatggtggtgtcagggctcccagtgcggaatggacaactccacgcccgagaggtggcccgaatggcacttgcactactggatgctgtgcgctccttccgcatccgccataggccccaggaacagctgcgcttgcgcattggcatccacacaggtcctgtgtgtgctggtgtggtagggctaaagatgccccgatactgcctctttggagacacagtcaacacagcttcaagaatggagtctaatggagaagccctcaagatccacttgtcttcagagaccaaggctgtgctggaagagttcgatggtttcgagctgg

SEQ ID NO: 497 - DNA, 1274 bp, Rattus sp.
aagtcacatattaaccgatggatacactaaactggtttcctgcaacctgagggtggctcctgataggtaccaatttggaccatggaacagagtccaggaatgtttccgaccctgccctaaagaaggcagacacttctttagcagccgttgtccagaccccctcgtaggacagactgttagaacaggctgtgcttcatctctgtttagagaactcaagcaattgctgccatgccggggaagccagtccttcactacttcgatggcagggggagaatggagcccatccggtggctcctggctgcagctggagtagagtttgaagaaaattttctgaaaactcgggatgacctggccaggttaagaagtgatgggagtttgatgtttgaacaagtgcccatggtggagattgacgggatgaagctggtgcagaccaaagccattctcaactacattgccaccaaatacaacctctatgggaaggacatgaaggagagagccctcatcgacatgtatgcagaaggtgtggccgatctggagttgatggttctctattacccctacatgccccctggggagaaagaggcgagtcttgccaagatcaaggacaaagcaaggaaccgttacttccctgcctatgagaaggtgttgaagagccacggacaagattatctcgttggcaacaagctgagcagggctgatgtttccctggttgaacttctctaccatgtggaagagatggacccaggcattgtggacaacttccctctgctaaaggccctgagaaccagagtcagcaacctccccacagtgaagaagtttcttcagcctggcagccagaggaagccttttgatgatgagaaatgtgtagaatcagcgaagaagatcttcagttaattcagtcagctatggatacactgtacccacaaagccagcctcagaaagctctgcaacaatgaagtattttgactaaatgttgaccgtacttattgggagggtaacatgttttctaaggcttctgtgttaattcatatagacatgactcatgaggaattgctgggatgccatctagttgagttaaaacctcaatctcgatcacttcctcggatattttcttaatgttcaataaaacaaaacaagcttcttagacgctggagtatccaaacattgtcatgaaatagctgtcatatccttgtcaaacagcgtcacgtagaaaccctcgtgtcaaactctcttacgcaaaagtaatctttccttatggagagtgtcctttctct

SEQ ID NO: 498 - DNA, 1790 bp, Rattus sp.
aattcaggcagatagtgaatggctatcgccaccagaagcacaagaagggaaggttatttcaggaacctctgatgctgcagatccccaagactgtggactggagagaaaagggttgtgtgactcctgtgaagaatcagggccagtgtggttcttgctgggcttttagcgcatcgggttgcctagaaggacagatgttccttaagactggcaaactgatctcactgagtgaacagaaccttgtggactgttctcacgatcaaggcaatcagggctgtaatggaggcctgatggattttgctttccagtacattaaggaaaatggaggtctggactcagaggagtcttatccctatgaagcaaaggatggatcttgtaaatacagagctgagtatgctgtggctaacgacacagggtttgtggatatccctcagcaagagaaagccctcatgaaggctgtagcgacggtggggcctatttctgttgccatggatgcaagccatccgtctctccagttctatagttcaggtatctactatgaacccaactgtagcagcaaggacctcgaccatggggttctggtggttggctatggttatgaaggaacagattcaaataaggataaatactggcttgtcaaaaacagctggggtaaagaatggggtatggatggctacatcaaaatagccaaagaccggaacaaccactgcggacttgccaccgcagccagctatcctatcgtgaattgatggacagcgataataaggacttacggacactacatccgaaggagttcatcttaaaactgaccaaacccgtctctgagtgagaccatggtacttgaatcgttcaggatccaagtcacgatttaaattctgttgacatttttacatgggttaaatgttaccactacttaaaactcctgttataaacagctttataatattggacacttaatgcttaattctgattctggaatatttgttttataaaagttgtataaaactttctttaccttttaaaaataaattttagctcagtgcatgtgtgtgtgtatgggttaggggaacttcctgtgtgaaatgtgttcacaaatgtttgagactaaagactgactgattccagatgtccggactgattcgggtgtcagtggtagacctggggaaaggtgacaggtgctctggatggagccttctgattttacctcagcgtcctgtcaggttaggtatgtgtaagtaaatctagcttatggggtaattgttttttctttatttgtgtgagtatgtgtgtgtggaggtcagagaacaactcatttctacagtgttgatcctagcgatcaaaatcaggttgtcaggctggaccacaggtgccttttactactgaggtatcttgccagccccactggttttaagtgacgtataattacatatgtttatgtagtacaatataatgtgttgtgatacgtgtatactatgaaatgatctgatagttcacctcaaatattttattactttgttgaacttttctagctgtttctaaaatacacagtatattatcattggacctgtcttgttaatgtagcccaggctggccttaagccataatcttccttctcagccttctgtgagctaagataaaaaaaaaaaatcatgtaatgttatacccagtctcaagtcttatatctggcaaaccttgacagtccagaagaactagagtaaattgtttgacagtcctctcaactttcctaattctgtgacctttcaatatagttcctcctgttgtgaccccaaaaa

SEQ ID NO: 499 - DNA, 468 bp, Rattus norvegicus (rat)
acctggggaaaggtgacaggtgctctggatggagccttctgattttacctcagcgtcctgtcaggttaggtatgtgtaagtaaatctagcttatggggtaattgttttttctttatttgtgtgagtatgtgtgtgtggaggtcagagaacaactcatttctacagtgttgatcctagcgatcaaaatcaggttgtcaggctggaccacaggtgccttttactactgaggtatcttgccagccccactggttttaagtgacgtataattacatatgtttatgtagtacaatataatgtgttgtgatacgtgtatactatgaaatgatctgatagttcacctcaaatattttattactttgttgaacttttctagctgtttctaaaatacacagtatattatcattggacctgtcttgttaatgtagcccaggctggccttaagccataatcttccttctcagccttctg

SEQ ID NO: 500 - DNA, 2002 bp, Rattus norvegicus (Norway rat)
ccctttaatttcctcgaaaactccaatcactcggctgaagccatgccttgtgttcaggcgcagtatgggtcctcgcctcaaggagccagccccgcttctcagagctacagttaccactcttcgggagaatacagctccgatttcttaactccagagtttgtcaagtttagcatggacctcaccaacactgaaattactgccaccacttctctccccagcttcagtacctttatggacaactacagcacaggctacgacgtcaagccaccttgcttgtaccaaatgcccctgtccggacagcagtcctccattaaggtagaagacattcagatgcacaactaccagcaacacagccacctgccccctcagtccgaggagatgatgccacacagcgggtcggtttactacaagccctcttcgcccccgacacccagcaccccgggcttccaggtgcagcatagcccgatgtgggacgatccgggctcccttcacaacttccaccagaactacgtggccactacgcatatgatcgagcagaggaagacacctgtctcccgcctttcactcttctcctttaagcagtcccgcccgggcactcctgtgtctagctgccagatgcgctttgacgggcctctgcacgtccccatgaacccggagcccgcgggcagccaccacgtagtggatgggcagaccttcgccgtgcccaatcccattcgcaagccggcatccatgggcttcccgggcctgcagatcggccacgcgtcgcagttgcttgacacgcaggtgccctcgccggcgtcccggggctctccctccaatgagggtctgtgcgctgtttgcggtgacaacgcggcctgtcagcattacggtgttcgcacttgtgagggctgcaaaggtttctttaagcgcacggtgcaaaaaaacgcgaaatatgtgtgtttagcaaataaaaattgcccagtggacaagcgccgccgaaatcgttgtcagtactgtcggtttcagaagtgcctggctgttgggatggttaaagaagtggttcgcacggacagtttaaaaggccggagaggtcgtctaccctcaaaaccgaagagcccacaggatccctctcccccctcacctccggtgagtctgatcagtgccctcgtcagagcccacgtcgactccaatccggcaatgaccagcctggactattccaggttccaggcaaaccctgactatcagatgagtggagatgatactcaacatatccagcagttctacgatctcctgactggctctatggagatcatcagagggtgggcagagaagattcctggctttgctgacctgcccaaagccgatcaggacctgctttttgaatcagctttcttagaattatttgttctacgcttagcatacaggtccaacccagtggagggtaaactcatcttttgcaatggggtggtcttgcacaggttgcaatgcgtgcgtggctttggggaatggattgattccattgttgaattctcctccaacttgcagaatatgaacatcgacatttctgccttctcctgcattgctgccctggctatggtcacagagagacacgggctcaaggaacccaagagagtggaagagctacaaaacaaaattgtaaattgtcttaaagaccatgtgactttcaataatgggggattgaaccgacccaactacctgtccaaactgttggggaagctcccagaacttcgcaccctttgcacacaggggctccagcgcattttctacctgaaattggaagacttggtaccaccaccagcaataattgacaaacttttcctggacaccttacctttctaagactttctcccatgcacgtcaaagaactggaaagaaaaaaaaaatccagagggggctggtcaagatgggtagagagctggctgaagtgtccggttcatgtctcccttctgtagacccctagccctcacccctaaagtaaacaaacaaacaagcaaacaaacgg

SEQ ID NO: 501 - DNA, 2533 bp, Rattus norvegicus (Norway rat)
ggagaggagaggagagggaaagccagccaagaacacatggagagaggggaggggatgtggaaagagggagaaggcgcagagagtaagagagcaagggcgtcaaacagcccctttaagagtaagccaggcatgcctggctaatgccaggtaactgtgggggcagagcctagaggggatgctaacagagctcatctcagtccactcttctcacccagtctgccccagtcaccctgtctttgtatccaccccttctgctaggaaacaccatcctcacacatccgtggagctcactgtctgtcatccttcggatgcaagtgtggctttcttcatccatattagttcccatcaaaactctccttctacctctctattttagttatcctgtggacagctactacacttctcttttttgtttttaaattacttatgtattattttaatacccactgaaatgcaagattttggagggcaagaaagcatagcaagtatctaaaggatgttcagtgaagggatgacttggtcaatcagtgtagctcattcagtaaggagcctcatagagcacccagtgcagtgatgaatgggtcactcgccatggcattctctagtgtgtaagtctcccatttttgtgaataactgtttgaaagattattttggcaatatctacctttcatcaccaaggtaaccacatctaatctctcttttgactggtcatttagccttattttctacctcaaaaacttgaaagatacaaggaataacaaaactttcctctaaggctctctgagagtatttaatgaacagcaggtaaaagcaagccaggctgtagaggtgacatgattgcctaggagctatgtagaggcatctttcatgtatacacgttaacaacacattcgaactacagttagctgactctgggacacccagaagaattgatgtcatgtttgtctgctttcatcctgtttgccttagggagccatggacatcgaagcatacttcgaaaggattggttacaagaactcagtgaataagttggacttggccacattaactgaagttcttcaacaccagatgcgagcagttccttttgagaatcttagtatgcactgtggagaagccatgtgtctgggcttagaggccacttttgaccacatagtaaggaaaaagcggggtgggtggtgtctccaggttaatcatctgctgtactgggctctgaccaaaatgggttttgaaaccacaatgttgggaggatatgtttacataactccagtcaacaaatatagcagtgaaatggtccaccttctagtacaagtgaccatcagtgacaggaactacattgtggattctgcctatggaagctcctaccagatgtgggagcctctggaattaacctcagggaaggatcagcctcaggtgcctgccatctttcgtttgacagaagagaatggaacctggtacttggaccaaatcagaagagagcaggatgttccaaaccaagagtttgttaactcggacctccttgaaaagagcaaatatcgaaaaatctattcctttactcttgagccccgcactattgaggattttgaatatgtaaatacctaccttcagacatcgccagcctctgtgtttgtaagcacatcgttctgttccttgcagacctcagaaggggtttgctgtttaattggttccacccttacaagtaggagattcagttataaggacaatgtagatctggttgagtttaagagtctgactgaggaagaaatagaagatgtactgaaaaccacatttggcatttctttggagaaaaagtttgtgcccaaacatggcgaactcgtttttactatttagggtaaattgttctccattattatctcagtcttaaacattctaaaaatatgcaaatacatatccataacagaaatcgcacagctcaatattgatcaactaatgacctgtatcttctatttcctacattttatacaaaacgaaacccagttgtcctgtcatttcaccaataaaaataccgccagttataatgaaataaacctgatcatggatgtaacgacaatcctctcaacattaatcaacaaaaattacttatcgaagaggtggcgatcttgggagccatattcatttacaaacctcccaacatcattttatggttgaactcagatgaaaaatgaatgaatatgaatgatcagagaacagcaggaagtaaagtcaggcagactaaatctgaggtccaaggtttacaagaaaccacctgtacaacttaggattagaataaagcaaagaagaatgaaccatcattacaggtccaggtaacttcccagtcctcaaaacagaactcacgccagtggacctgggctctgggattaggtgccaagacaatgacacggcttagaaggcttagaatttcttccagagataattttgcagacacagttctttttgtatctgattttttttaactatgagaatactggtattaagtgatttataccttatatataataatctttgtagcctataa

SEQ ID NO: 502 - DNA, 1089 bp, Rattus norvegicus (Norway rat)
ggcacgaggggtcgcggtggcagccgtgcggtgcttggctccctaagctatccggtgccatccttgtcgctgcggcgactcgcaacatctgacgccatgaccgagcaaatgacccttcgtgggaccctcaagggccataatggatgggttacacagatcgccaccactccgcagttcccggacatgatcctgtcggcgtctcgagacaagaccatcatcatgtggaagctgaccagggatgagaccaactacggcataccacaacgtgctcttcgaggtcactcccactttgttagcgatgttgtcatctcctctgatggccagtttgccctctcaggctcctgggatggaaccctacgcctctgggatctcacaacgggcactaccacgagacgatttgtcggccacaccaaggatgtgctgagcgtggctttctcctctgacaaccggcagattgtctctgggtcccgagacaagaccattaagttatggaatactctgggtgtctgcaagtacactgtccaggatgagagtcattcagaatgggtgtcttgtgtccgcttctccccgaacagcagcaaccctatcatcgtctcctgcggatgggacaagctggtcaaggtgtggaatctggctaactgcaagctaaagaccaaccacattggccacactggctatctgaacacagtgactgtctctccagatggatccctctgtgcttctggaggcaaggatggccaggctatgctgtgggatctcaatgaaggcaagcacctttacacattagatggtggagacatcatcaatgccttgtgcttcagccccaaccgctactggctctgtgctgccactggccccagtatcaagatctgggacttggagggcaagatcatggtagatgaactgaagcaagaagttatcagcaccagcagcaaggcagagccaccccagtgtacctctttggcttggtctgctgatggccagactctgtttgctggctataccgacaacttggtgcgtgtatggcaggtgactattggtacccgctaaaagtttatgacagactcttagaaataaactggctttctg

SEQ ID NO: 503 - DNA, 843 bp, Rattus norvegicus (Norway rat)
gggccgaggtgccgcggggttgctggagggtcgtgggcggcgtgcaggagacatgtcggcgggcagcagttgcagccagactcccagccgggctatccccactcgccgcgtagccctcggcgacggcgtgcagctcccgcccggggactacagcaccacccccggcggcacgctcttcagcaccaccccgggaggaaccagaatcatctatgaccggaaattcctgatggagtgtcggaactcgcctgtggccaaaacacccccaaaggacctgccaaccattccaggggtcactagccctaccagcgatgagcctcccatgcaggccagccagagccatctgcacagcagcccggaagataagcgggcaggtggtgaagagtcacagtttgagatggacatttaagggaccagccataggacgcagtgatgcttctgggcccctggggcccttgggaggagagccacagcagtcaggccttgtacccggcagacactgggtgtggatcggccacccagtcctgctcctcactcagggcacctgctctgccttccattttgtgaataccagcacatacctccttgtgcctctgttgatactgagctgctactccagggtaatgactctcacctacaccctccctgcatcaagcgccagcgagtggacacagaggagtctgtcggaatgatctggcaattctagccccaacctctggagcacacccaccttaccttaggttggggtacctgggaaagccaccctttacttctttccctgagaggaaataaaagccacatttaccctaggcccacagccgggccctgtctgaaaaaaaaaaaaaa

SEQ ID NO: 504 - DNA, 861 bp, Rattus norvegicus (Norway rat)
ggcacgagccaggacccccgcgcgccatgccgtccgagaagaccttcaaacagcgccggagcttcgaacaaagagtggaagatgtccggctcatccgggagcagcaccccaccaagatcccagtgattatagagcgatacaagggtgagaagcagctgcccgtcctggacaagaccaagttccttgtacctgatcacgtgaatatgagcgaactcatcaagataattagaaggcgcctgcagctcaatgctaaccaagccttcttcctcctggtgaatgggcacagcatggtgagtgtgtccacacccatctctgaagtgtacgagagcgagagagatgaagacggcttcctgtacatggtctatgcctcccaggagacgttcgggacagcactggctgttacatacatgtcagctctgaaggcaacagcaacaggaagagagccatgcttgtgacagacatacagccacttccaactaaagcaagcctctgcttcctgctacctgcatggagcccactgtgacactcagaccatccccggtcactcactcgtgtctgagaatctcagtgagagctgcctctgtcacggaccggaagccaacacagccacctctcgacctgctccccacagcacccaccctccctgcatgcaagctgtccctgctaacccccaatgttatgttacactgtgtaaatccccactgctgccgtgtgtgggttgtgtacgtcgtcatgtccctggtttataactatggtgcggtcgggaaggattcctgtaatgctgctctaaggatctggctcaggcagccattgtaggacacctgtactctgatgcactaagtccaataaaggcacaactgg

SEQ ID NO: 505 - DNA, 2226 bp, Rattus norvegicus (Norway rat)
aagaagcttggcgactgtaaggcgagaggaagcctccagcgggtcttgtcgctgagctacctcagctccacctcctctggccctggcccctagtgcgcagactgcctgcagccctcctgtagcatgtgtggcatctgggccctcttcggcagcgatgactgcctttccgtgcagtgtctgagtgcgatgaagattgcgcacaggggcccagatgcattccgttttgagaacgtcaatggatacaccaactgctgttttggcttccaccggctggcggtggttgaccccctgtttggaatgcagccaataagagtgaggaaatatccttatctgtggctgtgttacaacggtgaaatctacaaccacaaggcgctacaacaacgtttcgaatttgagtatcagaccaatgtggacggtgagataattctccatctctatgacaaaggcggcatcgagaaaaccatctgtatgttggatggggtgtttgcatttatcttactggacactgccaataagaaagtattcctgggcagagatacctatggtgtcaggcctttgtttaaagccttgacagaagatggatttctggctgtgtgttcagaagccaaaggccttgtctccttgaaacactccaccacccccttcctaaaagtggagccctttcttcctggacactatgaagttttggatttaaaaccaaatggcaaagtcgcgtctgtggaaatggtcaaataccatcactgtacggatgaaccactgcatgccatctatgacagtgtggagaaactcttcccaggctttgagatagagaccgtgaaaaacaatctgcgtatcctttttaacaacgctatcaagaaacgcttgatgactgaccggaggattggctgccttttatcaggaggcctggactccagcttggttgctgcctccctgctgaagcaactcaaggaggcccaagtgccctatgctctccagacatttgctatcggcatggaagacagccctgatctactggctgccagaaaggtggcaaattatattggaagtgagcatcatgaagtcctttttaactctgaagaaggcattcagtccctggacgaagtcatatttcccttggaaacttatgatattacgacagttcgagcatctgtaggtatgtatttaatttccaagtatattcggaagaacacagacagcgtggtgatcttctccggagaggggtcagatgagcttacacagggctatatatatttccacaaggcgccttctcctgagaaggcggaggaggagagtgagaggctcctgaaggaactctacctgtttgatgtcctccgtgccgaccgcactactgctgctcacggtctcgaactgagagtcccgtttctggatcatcggttttcttcctattacctgtctctgccaccagaaatgagaattccaaaagatggcatagaaaaacatctcctgagagagacttttgaggactccaacctgctacccaaagagattctctggcgacccaaggaagccttcagtgatgggatcacctcagtcaagaactcctggttcaagattttacaggacttcgttgaatatcaggttgatgatgcgatgatgtctgaggcctcccagaaatttcccttcaatactccccaaactaaagaaggctattactaccgtcagatctttgaacaccattaccccggccgggctgattggctgacccattattggatgcccaagtggatcaatgccaccgacccttctgcccgcactctgacccattacaagtcaactgccaaagcttagacgctctctacactcttgtgtaaaagtcaatgtttcttcctcctgctctgaaggtagagagacattgaaacaatcagagagaatgaaagtcaaccatcagctgctcaggcttatttaggcatggaaagaaataaaagtatcacatctaaaatgcctcctggttgtaggtaccagtgcggccttgtagctagagactgagtggctcttgctgtattgccactgtcgggatgacagtgagctatgctaaggggcatcttagttctgccttcattcctaacagctggctagtcagattgctatgtgagtcctttgtgggaactggtgacaattctgctttgtaggccaaggattcagtttctttctctttctttctttctttctttctttctttctttctttctttctttcttggaattc

SEQ ID NO: 506 - DNA, 3004 bp, Rattus norvegicus (Norway rat)
atggctcccttggctttggtaggggttgccctccttctgggggcaccccactgcttgggggaagctactccgaccccatccctgccacctcccccagctaatgacagcgatgccagcccaggcggctgccaaggttcctaccgctgccaaccaggggtgctgctgcctgtgtgggaacccgacgacccatcactgggggacaaggctgcacgggccgtggtgtactttgtggccatggtctacatgttcttgggtctgtctatcattgctgatcgttttatggcatccattgaggtcatcacatccaaggagaaagagatcaccatcaccaaggcaaatggggagaccagcgtgggcactgtacgcatctggaatgaaacggtgtccaaccttacactcatggccctgggctcctcagcacctgagattctgctgtctgtcatcgaggtctgtggccacaacttccaggcgggtgagctaggcccaggcaccatcgtgggcagtgccgccttcaacatgtttgtggtcattgctgtgtgtgtgtatgtcatcccggctggtgagagccgtaagatcaagcacttaagggtcttcttcgtcacagcctcttggagcatctttgcctatgtctggctttatctcattctagcagttttctctccaggcgtggtccaggtgtgggaggcactgctcacgctggtcttcttcccggtgtgtgtggtgttcgcctggatggcggacaagcgactgctcttctacaagtacgtgtacaagcgctatcgcaccgaccctcgcagcggaatcatcatcggggcagagggagacccgcccaagagcatcgagctggatggcacattcgtgggcactgaggtcccaggcgagctgggtgcattgggcacaggtcccgctgaggcgcgtgagctggacgccagccggcgcgaggtcatccagattcttaaggacttaaagcagaagcacccggataaggacctggagcagctggtgggcatcgccaagtactatgcactgctgcaccagcagaagagccgtgccttctaccgcatccaggccacgcggctgatgacaggtgcgggcaacgtgctgcgccgacacgctgcggatgctgcccgcaggcctggggccaacgatggtgcccccgatgatgaggacgatggtgccagccgcatcttctttgagcccagcctctaccactgcctggagaactgcgggtcagtgctgctgtcggtggcttgccagggtggtgagggcaacagcaccttctacgtggattaccgcacggaggatggctctgcaaaggcaggctccgattatgagtacagcgagggcacgctggtgttcaagcccggggagacgcagaaggagctgcgcatcggcatcatcgacgacgacatcttcgaggaggacgagcacttcttcgtgaggctgctgaacctgcgtgtgggcgatgctcagggcatgttcgagcccgacggcggtgggcggcccaaggggcggctggtggcgccactgctggccaccgtcaccattctggacgacgaccacgcgggcatcttctccttccaggaccgcctgctgcatgtgagcgagtgcatgggcaccgtggatgtgcgtgtggtgcgcagctctggcgcacgtggcaccgtacgccttccctaccgcacagtggacggcacggctcgtggtggtggtgtgcactacgaggatgcttgtggagagctggagttcggcgatgacgagaccatgaagactcttcaggtcaagatagtggacgacgaagagtatgagaagaaggacaacttcttcatcgagctgggccagccccagtggcttaagcggggcatctcagctctgctactcaaccaaggggatggagacaggaagctgactgcagaggaggaggaggcccagaggatagcagagatgggcaagccagttcttggggagaactgtcgcctcgaggtcatcatcgaggagtcttatgactttaagaatacggtggataaactcataaagaaaacaaacctggccttggtgattgggacccactcatggagggagcagtttttagaggcagttacagtgagcgcaggggacgaggaggaggatgaggatgggtctcgtgaggagcggctgccatcctgctttgactacgtgatgcacttcctgacggtgttctggaaagttctgttcgcctgccttccacccacggagtactgccatggctgggcctgctttggtgtctgcatcctggtcattggtctgctcactgccctcatcggagacctggcctcacactttgggtgcaccgtgggcctcaaggactcagtcaacgccgtggtcttcgtggctctgggcacctccatccctgacacgtttgccagcaaggtggccgcgctgcaggaccagtgcgccgacgcgtccatcggtaacgtgaccggctccaatgcggtgaacgtgttcctgggcctgggtgtggcctggtcggtggccgcagtgtactgggcggtgcagggtcgccccttcgaggtgcgtacaggcacgctggccttctcggtcacactgttcaccgtcttcgccttcgtgggcatcgcagtgctcttgtaccggcgccggccacacatcggcggcgagctgggcggcccgcggggacccaagctagccaccaccgctctcttcctgggcctctggttcctctacattctcttcgccagcctggaggcttattgccacattcggggcttctagggccccagccgctaccctgagggtggggacttgttggcacttgctcttggacccacccctgtctccctacccagactcaacctgggtacttcctaggctcctcctcatcagccttcttcctgggatcagcctccctttccccctggaatcccatcccttgccctcccttctcagaggcacccccttcagcccatctttgtgagttacacctgagccctctggccagacacccagcccc

SEQ ID NO: 507 - DNA, 1201 bp, Rattus norvegicus (Norway rat)
cgccaccaccccgccatgctcagagccaagatgctcgggagaggcccctacaagcccttagccatcctcaggcacatgggacctctctgtgccacaaggccacagcactggcgcttccagcattcctacgcagagaaacacagcaactgtgcccggcaccctctctggactggcccagtgtcctcaccgggaggcacccagcagtctcccattaatatccagtggacggatagtgtctatgacccgaagctggcaccgctcagggtctcctatgatgctgcgtcctgcagatacctctggaacactggttacttcttccaggtggagtttgacgattcctgtgaggagtcagggatcagtggtgggcctctgggaaaccactacaggctgaagcagtttcacttccactggggagcaacagatgaatggggctctgagcacatggtggacggccatgcctacccggctgagctccatttggttcactggaattccatgaaatatgaaaattacaagaaagccaccacgggggagaatggactggcggtgattggagtgtttctgaagctcggggcccatcacgaggccctgcagaggctggtggacatcttgccggaagtaagacacaaggacacacaggtgaccatggggccctttgacccttcttgcctgctgcctgcctgccgggattactggacctaccctggctccctcaccaccccaccactggctgagtcagtcacctggattgtgcacaagatgcccattgaggtgtccccgagccagctgtccacattccgtacactcttgttctccgggcgaggtgaggacgaggaggtgatggtgaacaacttccgcccgctccaaccactcaggggccgcaacgttcgctcctccttccaggtccccagggtgggaacaaagtcttgatctcaggatgaggtctgtaaggataggcagagcggatggaaaagggggtgcgcatttccagggtgcgacgcctggattaaaaaaaaaatggctgcagagatggctcaggggttaagagcactgactgctcttccagaggtcctgagttcagttcccagtaaccacatggtggctcacaaccatctgtaatgggatccgatgccctcttctggtgtgtctgaagagagcgacactgcactcatatgcattaaattaataaatctttaaaaaa

SEQ ID NO: 508 - DNA, 2807 bp, Rattus norvegicus (Norway rat)
ccgcgttaaagccggacggagtacttctattgctggcagacctgccccggagcgcgtaaacccgcacgctcgcgccgcccacgtccagctcgcgaatccggaggcgtccggttccaataatgccccggaaggcagctagtccagaggaggcagaaaggatgccgggctctgaagagatagaggctgggcggccgcggccggttttacgctctgtgaactcgcgcgaaccctctcaggtcatcttctgcaaccgcagcccgcgcgtcgtgctgcctttgtggctcaactttgatggtgagcctcagccctacccgaccttaccaccgggcaccggccgccgcatccacagctaccgaggtcacctttggctcttcagggatgcggggacccatgatggacttctggttaaccaaacggaactgtttgtgccatccctcaatgttgatggacagcctatttttgccaacatcacattgccagtgtataccctgaaagagcggtgccttcaggttgtacggagcctggtcaagcctgagaactacaggaggctggacatcgtcaggtcgctctatgaagacttggaagaccacccaaatgtgcggaaagacatacagcggctgacccaagagcacctcgagaatcaggccctgggagaggagcctgaaggagtccactgagattacttggtcctgaatttcggccttgatggtctgaaatcgatctacacataggacaggtcactttctttcggttttaaaatggttcattcttggagtaaaatatccatcatgtaaaagaaagttaactaacatcactgagctttgtagtgtttaagactaaacctgcaaagtgccaccgagtctgccctttctagagcattcatcagaagaagctgttttcagttttgcttcctagtaaggctggatgttcagcataaggatgttagtgtgagcgattcgcgaggagttgctctgtgtcctctaatctgaagaatacagcctcgtatgaacagagccccaccgctcacttggggaaggctgagaaggccctaatgctgggatggacatcctgtagaggcccagtgcctaatgtgtgtggagtcttcagtcagtgttggaggaacaaaccattgggtacttagtgggagagttggagggcctggctctctgtctgaggaaatcttaagtgtacacgtaaaggaacaacttagcagcttctgtttagaaagaactttctcttgagtttccatgtctcagcactttctttctactttgttagtttattttattttatttttgagacttgtgtagcccaggtcagcctcagtcactccggaggggatgctggtcttgaattccggatcctctgggagtgtgtcagcattgggagcacatgggtcgaccacagtctgctctgttcttgcttttcccattttgagacgggctcatactgtagccctgcctggcctcaagctagagtcagccctgtctccccacccagtctggctgcttagactgggtgggcttcccatattcactgccccagacagcagagacgagctgtccttgtgtttaggtctggttttgagagttccttctctgaggaagctgctggcaggagcagggtttctgttccttcccgtcagcccctagcattccagctgggcgccgcactctgctttggcaggcgctagttatgcttcgatgggagaggggagtgaagctccctcagccacacactccaaaccatgggtcccagagcagtctgcaatgagtagtagtttgtgggcagtcacagcttttcttacatattcaaatattgatgttcactacttctatcaaacattttgtagaacataattttttatttgtttttaattcctcagcagagaaaaatgagagaagcttgggcattgtgtgtggcacacaccagaaaggacagtcagctgagagggtgcagaaaggctcttgtgcgctggctctcagctgcatgtagtcctgtaacccagtgttctctctagtacacattttaattggttaaagcactttgtcctggccgagatcataaggtatatacagttttgtggcctgatttttcattgaacttcattgttttgttttcccctctttttcgtttttggttttgtttttggtttgttttttgctttttgttttatcaagatagagtttctctgtgtagcccaggctgtcctggaactccctttgtagaccaaacaactgattactggcctcaaacggagatctgtctgcctctgcctctccagtgctgggattgaagtatgcctaatcttcatctaacttagtaacttgtcttttccatgttactgcacacactgtctaaattccggtgtgctagcctctccctttgagggtgactgttgggagtatttgtctcagtcctgggctccttgagtgcagtctgatgctctaagatcagcaaaatcactgaacttaatactgacactcctgccgccctctcagcgtctctccttagtctgcagcattccgtgagtgaagcggcacaggccagtgtggagcctgtgtgtgggaagtcagcaggtgccgagctattgcaacattggttttattttttaagcctatctctgtctctaaaagatgtaatgtttgtcttatttaactggaagtttgaatactgttctctgtgccttaggacatgagtcacttgtccttgcacatcctgtaagtgtgttcctcagactttgtactctcctttgagttctctgaaaaagctgacctttagtacaataaacggtgctaagtgaagga

SEQ ID NO: 509 - DNA, 1133 bp, Rattus sp.
cctcggctgagctgcattccaatcccagctacatccggagcccagctacattcgagcccagccacatcccgagccaaccttccagaagcaccatgaacccaagtgctgctgtcgttctctgcctcgtgctgctgagtctgagtgggactcaagggatccctctcgcaagaacggtgcgctgcacctgcatcgacttccatgaacagacgctgagacccagggccataggaaaacttgaaatcattcctgcaagtctatcctgtccgcatgttgagatcattgccacaatgaagaagaacaatgagaagaggtgtctgaatccggaatctgaggccatcaagagcttattgaaagcggtgagccaaagaaggtcaaaaagagctccgtaactagagagaagccactcgccacagtgctgagaccgatggacagcagagagacggtctctccacctccctttacccagtgtgcggctagtcctaactgtccctgtttctcctgaccatggtcccatcagctggtactcccactacagcgtgatggacaaggcctggtcctgagacaaaagtaactccagcagcaaggcttcccaattctctaagagctggtccgaatcttccctcaggcagctatgacggctctcctagctctgttccgtaagctatgtgcaggtactaatctcttcagcatgtgccatgccccagcctgctccacacaccctccttctccctagctctaagctcatcagttctgagttcacctgagctcctttatttcaaatgcagtccaggtgagatggcaaatcaagtttgtcagaacaaacttaccaccaccttcccaagggaatttcataactcagaatactcacaggaacctagacatgcatgtttaaatattatttaatgaccgactgtacaaagtggaactcctagatgtattttttgtacgattttcattgtatatgtaagaacttgtgtggttaagtatgtatcaatgggtagttaaagtttacataggcaaatgctttgaatgctacatattacaagatgtgttggatggttttcaaaataaaatgtactgtattgaatgtagtatgagacaaaaaagtaataaagtaataataactgacatga

SEQ ID NO: 510 - DNA, 2383 bp, Rattus norvegicus (Norway rat)
gctaataagtgtgtcctttgctgacggtaccgagaaaccccgccccgtctgtacgtcctggtggcgcgcgggccggctgtgggtgtgggaagggcccgggtcagtcgacacccggaaggccggggccgcctcccgacgcccacctactagcttctccagctccatctttcccgagaagcggcagggacctccggcctccagcttaccgggcggatcgaagcagcggtcgggatgtactgctgggcttgctgcagtcaggcggctcggtgctcgggcaggcgatggagcaggtgacaggaggcaacctgctttccacgctgctcatcgcctgcgccttcacgcttagccttgtctacctgttccgcctcgcagtgggccacatggtccagctgcccgctggagcgaaaagtccgccatatatttactctccaattccgttccttggccacgcgatagcatttgggaaaagtccaattgagttcctggaaaatgcatatgagaagtacggacctgtgtttagctttaccatggtgggcaagactttcacttaccttttggggagtgacgcagccgccctgctcttcaacagtaagaacgaagacctgaatgcggaagaggtctacggtcggctgacaacgcccgtgtttgggaagggagttgcatacgacgtgccaaatgcagttttcctggaacagaagaaaatactaaaaagcggccttaacatagcccacttcaagcagtatgtttctatcattgaaaaagaagcgaagaagtactttaaaagttggggagaaagcggagaaagaaatgtgtttgaagcgctgtctgagctcataattttaacagctagccattgcttacatggaaaggaaattagaagtcagctcaacgagaaggtggctcagctgtacgcagacctggatggaggctttagccatgccgcctggctgttgccaggctggctgcccctgccgagtttcaggcgcagggacagagcccatcgagagatcaagaatattttctacaaggccatccagaaacgtaggctgtcaaaagaaccagccgaggacattcttcaaactttactggattctacatacaaggatgggcgtcctctgacggacgacgagatcgcagggatgctcatcggactgctgctggccggacagcacacatcctccaccaccagtgcctggatgggcttctttctggccagagataaaccacttcaagacaaatgctacttagaacagaaaacggtgtgcggggaggatctgcctcccttaacttatgagcagttgaaggatctgaatttacttgatagatgcataaaagaaacactaagactgaggcctcctataatgaccatgatgagaatggccaagacccctcagactgtggctgggtacaccattcctccaggacatcaggtgtgtgtttctccaactgtcaatcaaagactgaaagactcctgggtagaacgcttggacttcaatcctgaccgctacctacaggacaacccagcgtcgggagagaagtttgcctatgtgccgtttggagccgggcgccatcgttgtattggagaaaattttgcctatgttcaaattaagacaatttggtccactatgcttcgtttatatgaatttgacctcatcaatggatattttcccagtgtgaattatacaacaatgattcataccccagaaaacccagtaatccgttacaaacgaagatcaaaatgaagaaaggaacaaggagccagtgtggagacgggactgcaagctgcagcttggcagagaatgaagctttgacacagctttcatactgtactgttttttaagtgtgtggttctgaaagccagtttgattttaatgttttattaactcggtgatttttgtcagacctaatggcatttgaaacagttataatagttctgataggatttcagggaagccaagtttatgttagaaatcgtttaggggagcctcggtattcagagatgatacagaatatagcatccaggtaactaacttcagaagcacacgttgccgtagggagattccggcttggaactagtttgggaagttttaagcctggtcagatgctacagaggcaatgggtcattggtgtggttgggccacttctgtgcgtaaagatgtgagagggtgaaggataagttttctgcgaacgtctagatggtgtgagtgccctttgtagtgttaactgagagcaccactccagcgagatggcagcaatcttggaccttatcttgataaccttatttcctaaaaataataaatactaaagagtacttatgttattggttccagaaaaatccaaaatcaaatccttgtggaatttttaattttaattaaactcgtgc

SEQ ID NO: 511 - DNA, 709 bp, Rattus norvegicus (Norway rat)
ccacgcgtccgggaccgagcggctgcgtgtgctgggtcctcaccatggggcagatcgagtgggccatgtgggccaacgaacaggcgctggcatctggcctgatcctcatcacagggggcatcgtggctactgcgggacgcttcacgcagtggtactttggtgcttactctattgttgcaggagtgctcatctgtctgctggagtacccccggggaaagaggaaaaagggctccaccatggagcggtgtggacagaagtacctgaccgctgtggtgaagctgttcgggcccctcaccagaaattactacgtccgggctgtcctccacttactgctgtccgtgcctgcaggcttcctgctggccaccatcctggggaccgtctgcttggccattgccagtgtgatctacctgctggcagccatccggggtgagcagtggactcccattgagcctaaacccaaggagcggccgcaggttggaggcaccatcaagcagccacctaccaaccccccaccccggccaccagcggaggtccgcaagaagccaagtgaggccgaagaggaggcagcctcggcaggaggaccccaggttaacccaattccagtgacagatgaggtcgtgtgaccttcagtggctcctgcttgagtttccaaggtgttgctcccagagggtggtgatgcccactgtaataaacatggttaatagctggt

SEQ ID NO: 512 - DNA, 3980 bp, Rattus norvegicus (Norway rat)
cgggccgggctggaggggcgggcgggcggctacgagcatggtcctggtgttgcaccacatcctcatcgctgttgtccaattcctcaggcggggccagcaggtcttcctcaagccggacgaaccgccgccgcagccatgcgccgacagcctgcaggatgctttgctgagcctgggcgccgttatcgacatcgcgggccttcgacaggctgccaaggatgccctctcggccgtgctccccaaagtggagactgtctacacctacctggtagatggggagtccaggctggtgtgtgaggacccccctcatgagctgccacaggaaggaaaaattcgagaggctgtgatttctcggaagcggctgagctgcgatgggctgggaccttcagacctactaggaaagcccttggccaggctggtggctccactggcccctgacacgcaagtgctggtcatacccctgctggacaaggagactggaactgtggcagccgtcatcttggtgcactgtggccagctgagtgacagtgaggagcagagcctgcaggtggtggagaagcatgctctggtggccctgcagagggtgcaggccctgcagcagcgcaggcctgaagctgttcagaacacctcagcggatccctctgaagatcaaaaggatgagaagggatacaccgcccatgaccgaaagatcctgcaactgtgtggagaactctatgacttggatgccacttctctgcagctcaaagtccttcgatatcttcagcaggagacacaggccactcactgctgcctcctgctggtgtcagaggacaacctgcagctttcctgcaaggtcattggagagaaagtgctgggagaagaggtcagctttccattgaccatgggacgcctgggccaggtggtggaggacaaacagtgtatccagttgaaggacctaacctctgacgatgtgcaacagctacaaaacatgttgggctgtgagcttcgggctatgctatgtgtccctgtcatcagtcgagccactgaccaggtggtggccctggcttgcgccttcaacaagcttggaggagacttcttcacagatgaggatgaacgtgcgatccaacactgcttccactacacaggcacggtgctcaccagtaccttggccttccagaaggagcagaagctcaagtgtgagtgccaggctcttctccaagtggcaaagaacctcttcacccacctggatgacgtctctgtcctgctacaggagatcatcacagaggccagaaacctcagcaacgcagagatctgctccgtgttcctgctggatcagaatgagctggttgccaaggtgttcgatggcggtgtagtggacgatgagagttatgagatccgcatccctgcggaccaaggcatcgcgggccacgtggcgaccacgggccagatcctgaacatcccagatgcatacgcccatccgcttttctatcgcggcgtagacgacagcactggcttccgcacgcgcaacattctctgcttccctatcaagaacgagaaccaagaggtcatcggtgtggctgagctagtgaacaagatcaatgggccatggttcagcaaatttgatgaggacctggccacagccttctccatctactgtggcattagcatcgctcactctctcctatacaaaaaggtgaatgaagcccagtaccgcagccacctggccaacgagatgatgatgtaccatatgaaggtctctgacgatgaatacaccaaacttctccatgatggcatccaacctgtggccgccattgactccaactttgccaacttcacctatactcctcggtctctgcctgaggacgatacttctatggccatcctgagcatgctgcaagacatgaacttcatcaataactacaaaattgactgcccaactctggcccggttctgcctgatggtgaagaaaggctaccgggatccgccctaccacaactggatgcacgccttctctgtctctcacttttgctacttgctctacaagaatctggagctctccaactacctcgaggacatcgagatctttgcgttgtttatttcctgcatgtgtcacgacctggaccacagaggcacaaacaactccttccaggtggcctcgaaatctgtgctggctgcactctacagctcagagggctctgtcatggagaggcaccactttgctcaggccattgctatcctcaacacccatggctgtaatatctttgaccacttctctcggaaggactatcagcgaatgctggacctgatgagggacatcatcttggccacggacctggcacaccacctccgcatcttcaaggacctgcagaagatggctgaagtgggttatgaccgaaacaacaagcaacaccacaggcttcttctatgcctccttatgacctcctgtgacctctctgaccagacaaagggctggaagaccaccagaaagattgcggagctgatctacaaagagttcttctcccaaggagacttggagaaggccatgggcaaccgaccaatggagatgatggatcgggagaaggcctacatccctgaacttcagatcagctttatggagcacatcgccatgcccatctacaagctgttacaagacctgttccccaaggcagcagagctgtatgaacgcgtggcctccaatcgtgagcactggaccaaggtgtcccacaagttcaccatccgaggcctccccagtaacaactcgctggatttcctggatgaggaatatgaggtccctgatttggacgtcaccagggctcctgtcaatggctgctgcagcctcgagggctgagtgatcccctctagggaccctccctgcccggccctcctttcacaactctctaccagtctgtctgatgcattgggaaccagagccatgggtcctgggttctagaccaggatgtcccctgtgacctggcacatgccacccttcctgggcttcgtctttctcatctgcagaaggaattcgagattcgcagtctcacacagacttggccgtttgttcttcaagagcacagtagtgaccagtggcagtgggcttccttctgcacctctgactgtaccgtgcccagttctgcccaagccactccatctttgagccacagaaccttctgtgaacccattagagccccattacgtcagtatccttgttttcctggaggaatcccaggtctctggagacttcgagatcctcatggaagaaggagaggccaccgagagagcagagggtataaatcagtcaccagctagaagtcgccatagggtgaagggaccctgagggtgcctctgtgcttctggcaggactgggaccctggaggaagctgacagccaggttgctcagtgctctgcaggaggcagtgctccagcagagaaggcaggaataagggacagaaggatcctcaagctgggagacagtccctacacacccctgcccttcaggtgttgtgacctgaagtgagttcctttccctagctagccaagacaggatcattagacagcctattctctctttagatcaaagtctccgtcattctgtggagtccgtgagtggttgtggcatgctctgccaccctgaggcacagagagcctaacctcctttcctctgagtgtatccccctggtctgagcccctctcccattcctgccatcagagaggggcctggcctctctccacagggcttctctcctcttcaaggccatatccacacctgccccccggagggctcaggagactctcccagggctgggcctcttgggtgagtggccactagcttctccttctgttttgttctgtatgtattgtgggtgggggagggggccacctgccttacctactctgagttgcctttagagagatgcatttttctaggactctgtgcacctgttgttgtatgtagtcctgtgggctgagtgctttgtacatgagaataaatctatttctttctacca

SEQ ID NO: 513 - DNA, 428 bp, Rattus norvegicus (Norway rat)
caccctaacctaaaccttttgaattttgaattaatgggtaccctatagaaaaaatgacctgcggaaaaccaaacagtgaagggaaagaaggaaagaattccaattgacacaatttaaataaaatatggcttttcaaataaaggaagagaagtttcttttgggcacacaatctaaacaatatttatgtataattcagctcttatttggcttaaatgggcttagtgggaaatgttatcatttttactattttctacagagaaaatattttccagtttatcaagtaactctggactttggaattacctgtttttatgttccagctgtctatatagttgtttctctgaaattgtacataaaatgtttttacattaaaatgaattactgtataaagtactgcattatgcataataaagatactaatgctttat

SEQ ID NO: 514 - DNA, 976 bp, Rattus norvegicus (Norway rat)
gtctggactgcagacaggcggcacggagagaccggcgagctccgatcggtcggagctaaccgctgccaggcggctgccgcggccccgcacacgccccagtcgagcgaagatggtgggccggaacagcgccatcgccgcggggctgtgcggtgccctcttcatagggtactgcatctactttgaccgcaaaaggcgaggtgaccccaacttcaagaacaggcttcgagaacgaagaaagaaacagaagcttgctaaggagagagctgggctttccaagttacctgatttaaaagatgctgaagctgttcagaaattcttccttgaagagatacagcttggtgaagagttattagcacaaggtgactatgagaagggtgtggaccacctgacaaatgcaatcgctgtgtgtggacagcctcagcagttgctgcaagtgttacaacagactcttccaccaccagtgttccagatgcttctgaccaagcttccaaccattagtcagagaattgtcagtgctcagagcttggctgaggatgatgtggaatgagccagacaccaacatgataaatctcagtaaaatgataacagttagctgcaggctgctctgctcggggggataagggcaaactgtgcttgtcatgaactgtctcacactgacatctccaaagtgaacctgaactttggtagagccattgtctgttctatttatttttccagtgagaagtattttgatagcttttcattttataaatacactgcgttaaccaaaagatcatggatttcgtttgttcttgacatgcagttcaatgtaaatacagtagtattaggtagagactcctggtgattttaaaggattgaaaagctgaggaatagttgaataatgcacattttaaagactagaacattttattgtcgttgtaaaattgagtagaaacttgtgtttgtgaaaactgagcattaaaaccttacagagaca

SEQ ID NO: 515 - DNA, 759 bp, Rattus norvegicus (Norway rat)
ggcacgagcagtgcccgagttaaggggaattggaggcaggcgccgatccacagcgatatcgagacactcagagccacaggcaccatgtccgatcctggtgatgtccgacctgttccacacaggagcaaagtatgccgtcgtctgttcggtcccgtggacagtgagcagttgagccgcgattgcgatgcgctcatggcgagctgtctccaggaggcccgagaacggtggaactttgacttcgccactgagacgccactggagggcaactacgtctgggagcgtgttcggagcccagggctgcccaagatctacctgagccctgggtcccgccgccgtgatgacctgggaggggacaagaggcccagtacctcctcggccctgctgcaggggccagggccagctccggaggaccacgtggccttgtcgctgtcttgcactctggtgtctcacgcccctgagaggcctgaagactccccgggcgggaccgggacatctcagggccgaaaacggaggcagaccagcctaacagatttctatcactccaagcgccgattggtcttctgcaagagaaagccctgaagtgcccacgggaggctcgccttcttctgctgtgggtcaggaggcctcttccccatcttctgccttagccttcattcagtgtgtcttaattattatttgtgttttaatttaaacttctcctgtatatactctgcctgccccctcccctcgtgcaattcgatatacaagcttatcgatacc

SEQ ID NO: 516 - DNA, 1700 bp, Rattus norvegicus (Norway rat)
agtggatggagaccaagtccatcaattagaagataagtctcaaatggagaaccggtgcctccccaagaaagttccaggtttctgttcctttcggtatggactggctatccttttgcacttctgtaacattgtcatcatggctcagcgagtgtgcctgaacctcacaatggtagccatggtgaataaaacagagccaccccatttatctaacaagtctgtagcagagatgctggataatgtaaagaaccctgtgcattcctggagtcttgatattcaagggcttgttctcagttctgtcttcttgggtatggttgtgattcaagttcctgttgggtacctatctggagcatacccaatggagaaaataattgggtcttcattgttcctcagctctgtgctgtccctgctcatcccaccagctgcacaagtcggagcagctttggtcattgtatgccgagtactccaaggaatagcccagggagcagtgtcaacaggccagcatggaatatgggtcaaatgggcacctcccttggaacgaggcagacttacctctatgactctatcagggtttgtaatgggaccatttattgccctgcttgtgagcggcttcatctgtgatcttctgggttggcccatggttttctacatctttggtattgttgggtgtgttctgagtcttttctggttcatccttctctttgatgaccccaacaaccacccatatatgagcagcagtgagaaggattacatcacatcctctctcatgcaacaggtgcactcaggcagacaatctctgccaatcaaagctatgcttaagtctcttccactctgggccattatcctcaatagctttgctttcatatggtcgaacaatcttctggttacatacacgccaacatttattagcaccacgcttcatgttaatgttagagagaatgggctgctgtccagcctcccctatctgcttgcctacatctgtggtatcgtagcaggtcagatgtcagacttcctcctgtcaaggaagattttcagcgtagttgctgtccggaaactcttcaccacactagggattttctgtcctgtgatttttgtcgtgtgcctgctctacctgagctacaacttctacagcaccgtcattttccttacacttgccaactcgacacttagcttttccttctgtggacaacttatcaatgccttggatattgctcccagatattatggatttctaaaggcagtcacagctttaattggaatatttgggggcctaatttcttcaactcttgctgggttgatccttaatcaggatccggaatatgcttggcataaaaacttcttcttgatggcaggcattaacgtgacatgcctggctttctaccttctgtttgcaaaaggagatattcaggactgggctaaagaaacaaaaaccacacggctgtgaagttagtagaagagtgagcacctgagaaacatgaggtcagcatccatattgaaaggaagaggattctgtgtgggactgcagtcatgggagtcatgaacacctgaagaccggtagcctgaagcttttaagggagtcattgcctcccactttagtctgagtgattcttttgcactgtgtattgtgtgtaacaagttatacttctgactttaaagaggaatctgtctgtcttcctatgatccaataaacaaacgtattcggg

SEQ ID NO: 517 - DNA, 4326 bp, Rattus norvegicus (Norway rat)
tcctctgccacctcagtaaataagtgggtgtcgcctgaactgaacagcaagagaaaagaagccagccaagtgagagcacagctcctctgtcactgccgcccccttgcaagtctggcggcttctcgcggggccagacgctgcgccccaggcgccctgcagatggggtggacagggacccggagctcaagccaccggtgacccgcgcgtggctggccgaccggccttccccgcttgcagaggatgttaagcagaggagccctggaaccgcatccgacactggccgacgttcgctaggctgcaacttggaatgcccagggagcggtcgggctcctaagaccgcgtcgccgcgtctagggaagctgcgctccggatttggaggcggagacctcaggcggcggagacctccggcggcggctgcagagggacgagccgggcgcaggagggggcgcgctttctcccagcgggtctcagtaatgaggagactgagtttgtggtggctgctgagcagggtctgtctgctgctgccgccgccctgcgcactggtgctggccggggtgcccagctcctcctcgcacccgcaaccctgccagatcctcaagcgcatcggacacgcggtgagggtgggcgcggtgcacttgcaaccctggaccacggccccacgcgcagccagtcgcgctcaggaaggcggcagggcgggtgcccagagggatgatccagagtccgggacgtggcggccaccggcgccctcgcaaggcgcacgctggttggggagcgccctgcatggccggggtccacccggctcccgaaagctcggggagggcgcgggggccgagaccctgtggccgcgggatgccctactgttcgctgtggaaaacttgaaccgtgtggaagggctcctaccctacaacctgtctttggaagtagtgatggccattgaggcgggcctgggcgatctgccgcttatgcccttctcttccccaagctcaccgtggagcagtgaccctttctcctttctgcagagcgtgtgccacaccgtagtggtacaaggggtgtcggcgctgctggccttcccccagagccagggcgaaatgatggagctggacttggtcagctctgtcctgcacatcccagtgctcagcatagtgcgccacgagtttccgcgggagagtcagaatcccctgcacctacagctgagtttagaaaactcactaagttctgatgctgatgtcactgtctcaatcctgaccatgaacaactggtacaattttagcttgttgctctgccaggaagactggaatatcacggacttcctcctccttacggagaataactccaagttccacctcgagtctgttatcaacatcactgctaatctgtcctccacaaaggaccttctaagtttcctgcaggtccagatggacaacattaggaacagcacacccacaatggtgatgtttggctgtgacatggacagtatccggcagatatttgaaatgtccacacagtttgggctatcacctcctgaacttcactgggttttaggagactcccagaatgtggaggaactgaggacagaaggcctgcccttagggctcattgctcatggaaaaaccacacaatctgtctttgagtactacgttcaggatgccatggagttggttgcaagagctgtagccacagccaccatgatccagccagagcttgctctccttcccagcacaatgaactgcatggatgtgaaaaccacaaatctcacttctggacagtatttatcaaggtttttagccaacaccactttcagaggtctcagtggttccatcaaagtaaagggctccaccatcatcagctcagagaacaactttttcatctggaacttgcagcacgaccctatgggaaagccaatgtggactcgcctgggcagctggcaaggaggaaggatagtcatggactctggaatatggccagagcaggcccagaggcacaaaacccacttccagcacccaaacaagttacacttgagagtggtgacattgattgaacacccatttgttttcacgagagaagtagacgatgaaggcttatgccctgctggacagctctgtctagaccctatgactaacgactcttccatgctggatcgtctgtttagcagcctgcatagcagtaatgacacagtgccaatcaagttcaagaagtgctgttatgggtactgcatcgatctcctggagcagctagcagaagacatgaactttgactttgacctctacattgtaggggatggaaagtacggagcttggaaaaatggtcactggactgggctggttggtgatctcctgagtgggacagccaacatggcggtcacttctttcagcatcaataccgcacgaagccaggtgatagatttcaccagccctttcttctcaaccagtttggggatcttagtgaggactcgagacacagcagctccaattggagccttcatgtggccactccactggaccatgtggctgggaattttcgtggctctccatatcactgccatttttctcactctgtatgaatggaagagcccctttggtatgacccctaaggggaggaacagaaacaaagtcttctccttctcctcagctttgaatgtctgctatgcccttctgtttggcagaacagcagccatcaaacccccaaaatgctggactggaaggtttctgatgaatctttgggccattttctgtatgttttgcctttctacatacacagcgaacttggctgctgtcatggtaggtgagaagatctatgaagagctttctggaattcatgaccctaagcttcatcatccttctcaaggcttccgctttggaactgtccgggaaagcagtgctgaagactatgtgcgccagagcttcccagagatgcatgagtacatgagaaggtacaacgtgccagccacccctgatggagtgcagtatctgaagaatgatccagagaaactagacgccttcatcatggacaaagcccttctggattatgaagtgtcaatagatgctgactgcaagcttctgaccgtaggaaagccatttgccatcgaaggatatggcattggtctccctccaaactctccattgacctctaatatatctgagctcatcagtcagtacaagtctcacgggtttatggatgtgctccatgacaagtggtacaaggtggttccctgcggaaagagaagctttgccgtcactgagactttgcaaatgggcatcaagcacttctctggactcttcgtgctgttgtgcataggatttggtctctccatcctgaccaccattggtgaacacatagtgcacagactgctgttaccacgcatcaaaaacaaatccaagctgcagtactggctgcacacgagtcagaggtttcacagagcattaaacacgtcattcgtagaagaaaagcagccacgttccaagacaaaacgtgtggagaagaggtccaacctgggaccccagcagctcatggtatggaatacttccaatctgagtcatgacaaccaacgaaaatacatctttaatgacgaggaaggacaaaaccagctgggtacccaggcccaccaggacatccctctccctcagaggagaagagagctccctgcctcactgaccaccaatgggaaagcagactccctcaatgtaactcggagctccgtgattcaggaactctctgagttggagaagcagatccaagtgatccgccaggagctgcagttggctgtaagcaggaagacagagctggaggagtatcaaaagacaaatcggacttgtgaatcctaggctgtgtctccccccactttctcagcccctggtactctgaagcccttgagacactttgtaaagcccttttatattccttgacaaaggtgtggggtctggcaatgaagtgtgctgttctctgcctaaggtgcagcagcagcagcagcagcagttcttcccacaaaggcccccaggtcttcagggtagtaatcgttccgatagtaggaagctagggttagtcgggagtaaagtctgtctgaggggatcggcgagctgccagacaactctggctcctctcaaccttttcacctggtgccacaaaaaaaattctggtttttagccctttctctgcacctcaacaagagataaaaagccggcgctcatacctgtgtcttactgggttggtttttaatattactacaaaacaaaattatccaatgttgcagatttgatacaactccccaatctagatctgatctaacattctgaatgagcagggtaggagccaggaaaacgggacagaaca

SEQ ID NO: 518 - DNA, 806 bp, Rattus norvegicus (Norway rat)
gcttgaatctaatacgtcgatcataccatgttgaagatgagcgggtggcagcgacagagccaaaataacagccggaacctgaggagagagaaaccggtccaattacagtcatggcagctgagtctctgcctttcgcctttgagacagtgtccagctgggagctggaagcctggtatgaggatctgcaggaggtcctgtcctcagatgaaattgggggcacctatatctcatccccaggaaacgaagaggaagaatcaaaaaccttcactactcttgaccctgcatccctagcttggctgactgaggagccagggccagcagaggtcacaagcacctcccaaagccctcgctctccagattccagtcagagttctatggctcaggaagaagaagaggaagatcaaggaagaactaggaaacggaaacagagtggtcagtgcgcagcccgggctgggaaacagcgactgaaggagaaggagcaggagaatgagaggaaagtggcacagcttgctgaagagaacgagcggctcaacgaggaaatcgagcgcctgaccagggaggtagagaccacacggcgggctctgatcgaccgcatggtcagtctgcaccaagcatgaactgttggcatcacctcctgtctgtctctcccggagtgtacccagcaccatcacgccagtgccaagcatgtaatctccagtgcacatgctgaggaggggactgagggtagaccaaaggagaggggcttgtacactgtacattctttattcattccatacccagtaaagtgactttgtgtgaaaaaaaaa

SEQ ID NO: 519 - DNA, 4387 bp, Rattus norvegicus (Norway rat)
ggcacgagggggagccgggcatgggggccgccctccgggggggccggggccgccgccgccgccgccgcggcagcgactgaagccgcgcaacaaggaggggcggggagtggtcgccgccgtccccgggaggcgccggagctcgactgcactcgctgccagccagccgtcccgagccgctcgcagattccctgagaacacccggcaagtaccacgtgcctacaactgcttccccggtcacagctgtggggagcttggggtgcggcagacaaatttctgtattcagctgcccaggcagaggagaatgggggctccacagcttgaagaatgaagacacgacagaataaagactcgatgtcaatgaggagtggacggaagaaagaggcccccgggccccgggaagagctgagatcgaggggccgggcctcccctggaggggtcagcacgtccagcagtgatggcaaagccgagaaatccaggcagacagccaagaaggcccgagtagaggagacctctaccccaaaagccaacaagcagggccggagcgaggagatctcagagagtgagagcgaagagaccagtgcgcccaaaaagaccaagaccgaggagcttccgcgcccacagtctccctcggatctggacagcttagatggccgcagcatcaatgatgacggcagcagtgaccctagagatatagaccaggacaaccgaagcacatcccccagcatctacagccctggcagtgtggaaaatgactcggattcatcctctggcctgtcccagggcccggctcgcccctaccacccacctccactctttcctccttcccctccaccaccagacagcattccccgacagccagagtctggctttgaaccgcacccttctgtgccgcctactggatatcatgctccaatggagccccccacatctcggttattccagggcccacctcctggagctcctcccccacacccacagctctaccctgggagtgctggtggaggtgttttatctggaccccccatgggtcccaaagggggagcagccgcctcctcagtgggtccccctagtgggggcaagcagcaccccccacccactaccccaattccaatatcaagctctggggccagtggcgctcctccagcaaagccccccaatactccagtgggtgctgggaacttaccttctgctccaccaccagctactttcccccacgtgacaccaaacctgcctcctccacctgccctgagacccctcaacaatgcctcagcctctcctcctggcatgggggctcagccaatccctgggcatctgccctctccccatgccatggggcagggtatgagtggacttcctcctggcccagagaagggcccaaccctggccccctctccccaccctttacccccggcttcttcctccgctcctgggcccccaatgcggtacccgtattcatcctgctccagtagctctgttgcagcgtcttctagttcctccgccgccacctcccagtacccagcttcccagaccctgcccagttaccctcactccttccccccaccaacaagtatgtctgtctctaatcagccacccaagtacacccagccttctctcccatcccaggctgtgtggagccagggcccacctcctcctcctcctccttatggccgcctcttgcccaacaacaacactcatccgggccctttccctcctaccgggggtcaatccacagcccacccgccagcccctgcacatcaccatcaccagcagcagcagcagccacagccacagccacagccgcaacaacatcatcatggaaactctgggccccctccacctggggcatatcctcaccccctagagagcagtaactcccaccatgcacacccttacaacatgtcaccctccctggggtctttgaggccctacccaccagggccagcacacctgcctccgtctcatggccaggtgtcttatagccaagcaggtcccaatggtcccccggtttcttcttcttccaactcttccgggtcttcgtctcaagccgcctattcatgctcacacccttcttcatcccagggcccccaaggggcatcctaccccttcccaccagttcctccaatcaccacctcctcagctactctttccactgtcatcgccaccgtggcttcctcgccagcaggttataagacagcctcaccacctggcccccctcagtacagcaagagagccccatccccagggtcctacaagacagccaccccgcctggatacaagccagggtcaccaccgtccttcagaacagggaccccacctggctatcgaggcacctctccgccagcaggcccagggaccttcaagccaggttcacccaccgtggggccggggcccctaccacccgcggggccttcaagtttgtcatctctgcctccaccacccgcggccccgactacagggccgcccctgactgccacgcagatcaaacaggaaccagctgaagagtatgaaacccccgagagtccggtgcctccggctcgcagcccctcgccccctcctaaggtggtggacgtgcctagccatgccagccagtcagccaggttcaataagcacctggaccgtggcttcaactcgtgcgcgcgcagcgacctgtactttgtgccgctggagggatccaagctggccaagaagcgcgcggacctggtggagaaagtgcggcgcgaggccgagcagcgcgcgcgcgaagaaaaagagcgcgagcgcgagcgggaacgtgagaaggagcgcgagcgcgagaaagagcgcgagctggagcgcagtgtgaaattggcccaggagggccgtgctccagtggagtgcccgtccctgggtccagtgccccatcggcctccctttgaacctggcagcgctgtggctaccgtgcccccttacctgggtcctgatactccagccctgcgcactctcagtgaatacgcccgacctcatgtcatgtctcctggcaatcgcaaccacccattctatgtgcccttgggggcagtggacccggggcttctgggttacaatgtcccagccctgtacagcagcgacccagctgcccgagaacgggagcgggaagcccgtgaacgtgacctccgtgaccggctcaagcctggctttgaggtgaaacctagtgagctggaacccctacatggggtccccgggccaggcctggatcccttcccccgacacgggggcctggctctacaacctgggccacctggcctgcatcctttcccttttcatccgagcctggggcccctggaacgagaacggctagcgctggcagctgggccagccctgcgtcctgacatgtcttatgctgagcggttggcagctgaaaggcagcatgcagaaagggtggcagccctgggcaatgacccactagcccggctgcagatgctcaacgtgactccccatcatcaccagcactcccacatccactctcacctacacctgcaccagcaggatgccatccatgcggcctccgcctcggtgcaccctctcattgaccccctggcctcagggtctcaccttacccggatcccctacccagctgggaccctccctaatccccttcttcctcaccctctgcacgagaacgaagttcttcgtcaccagctctttgctgccccttaccgggacctaccggcctctctatctgcgccaatgtcagccgcccatcagctgcaggccatgcacgcacagtcagccgagctgcagcgcttggcactggaacagcaacagtggctgcacgctcatcacccattgcacagcgtgccgctgcctgcccaggaggactactacagtcacctgaagaaggagagtgacaagccgctgtagaacctgccatccagacagcacccactgctccttcatccagaccttggaggaccacccccgaccttttgaccccatcccacccccaagccgaggacagggtgctgcccacttgcagagcttctgcagccgggcagagggagggagggaagaagggacagacaaggtcagggcccggggaagtggcaagggtggggacagaaagtggacagtatcttggaccaggtccctcctcccatcccctgcttttcttctgtatgcccaatccttggtggccactgctcctcccctaacccgttggtgtgatttttttcatctgttagatgtggctgttttgcgtagcattgtgtgctgcccctgccccatccctgtgtgtgcaccccctcggcgatatgtgccccttgcccgtcccacattaataatttatatatataaatatctatatgatgctctttaaaaacatcctgaccaaaacatcccaacaaaaacatcctcacggtgccccaaaaaaaaa

SEQ ID NO: 520 - DNA, 2657 bp, Rattus norvegicus (Norway rat)
gttttttttttttttttttttttttttttttttttttatgaagaataagcgatccgtttgggatttattgcatttaaagacggcagattattaaaacagtaggtatgataaatacagtaagaaaataactttaaatctcaaacaaaacagtgaacagaattcaagactaagcaatgtaaaggcaataaggtaacaaaattagtgctttactgggtacagggaaagtaactgaagtctatctcaaactcttcccggctacatttgagggcttaagttactttagcaagtatgtctttataacaattagaaatataactaaggatataaacccagtttatttaaaaattaaagttatttgcttagtggtacataaaaggcttcagaaaattcaagtttaacaaaaaaaaaaaaaaaaggaagtgtaatcaaagaaagtgcacttaaagccgtttgccagcaattaaagggctcttccaggctggaggtgtggctcagccctaaagcgcttgcccagcatgtgcaaggccctgggttcagttcccagcaccgcaaaagaaagaacaagtggcaattactccttctagtataggatgatctctcagtcacaaaagaacatagtaataaaatcagtcttcctgtaggcactgtgaacctttaattaaaaaaaaataacctaaaccagacccagccctctgaattttcatctacttcttccttttagtggcttttgtaaacttcgtaactaggagtgaatgctcttaagagaaacgattgcctttttaaattcacattaattccgtagtggagagcctcgatgtgcctgtgtctttttatcttagtagagaacaccaccgagtgtaaatttttccaacagtcatctgttgttctctcagtagactcagtagactgtcaactcagtaactgaatgtaaattgatgactagttttgcttagaaataaaagaaaaagaatgacagagttcactgcgcattctacatgtattaaacagataatacctaactccccacaggtagtgacattaatacatgtgcgccttctgacagtgctttagtgaagtgcccaaatctggataacccaagggaggcacacccaagactggctccaccttcgtattttccgtcagaagaggagagtagtcagtccctgttaaacagggtaggactgatcgcaaggtgcgcagatccgagagccacgtgacttcataaatgcccagggtacacagctcaggggaggggcactcagtttaaatctggtcggttccattctcacccaacttggagtagtcctttctccaactacataccgagaacgtctgtgccttagtagataactttcttaagtgccctgaaagatcctctggtaatactagcgttttgctgacgtgatcaaagtaaagcaagtagtccactttttaagaaaagattccaagttaatgagcacagttaaagcttctaggtgacacctttggcctcagactttcgagctgggttcctaacgtgacttcccttcgatgttcaagtctaacaggtttagttagaactgctttgcacactgggaagcacaaggcacacccaaatgacattctttaaaccagaactgggccgtcccataacagagccagcctttcagtgagtgctgggtgctgggtgctgggtgctgggtgctaagtgctctcttgagcaagagaaatgtaacgcaaaggagccgccccttggacctccagtgaaacagtctgtccaatgagatgatctcgagaggcgcgtcaccgctgggctgttggaggcaatgtaaacattttaggctgtggcacagctgtttcctaaggatttgtccagcattagccggaggggctgcgagtgatcacttctaagtattcagtgcagtgaaaggcgagtggaactctgacttcatagtcacaactcattactttaggaggaaagcatttctgttcggtagcgtagagggcctactgccatttgcattagtgagaataatcaacctgagaaccagacagaaaggtgcaaacacagctctcctttggcacaaggacattaagtggtgaaggcatcagactccagcatcaactggaacaacctgaaaggcaagaagtcctgccatactggagtagacagaaccgccggctggaacatccctatgggcctgctgttcagcaggatcaaccactgcaagttcggtgagcagagccgggaagggagattgggaggggccatgcagaaaaaaaggggccctaagaagggccataggtttggggtccataaaagtgaagcccctcaaaaatgaacctcaaggaaatagggaagaggactaggaggaaccaggggctaaggaatggagtcaggacggttgtctttattgcaaataatggcattagtggctatacattcgcttgtctctctcatgatggagatcagaggtgagcattctgtggctgataaggtcttgagggctccttccttctttctggaccatcatttccatcatagtacttccacattcaaaaagcaaccttgctgaggcagtcacaattcaggcaagaacgagagcaagtggaaatgtacaccaaccgtggtcagtgtttgaaaagagccttctgctgggttcggtccccagctctga

SEQ ID NO: 521 - DNA, 1998 bp, Rattus norvegicus (Norway rat)
ggtgctgctgctgcatgtctgactgagaagggagccgagcatctgaggagcaagacatcagaaggctggagtcccttccctgactaggccagagctaaaaggacaaggctcagggctagcctctgcctatctagttcttttctccctgaagcttacaccatcctgtgggagccgatgcccgtctcattttgactcagagtctgtccctctgcttgtcttctacaaaccatgtggctgtacctgctggcactggtgggcctgtggaacctcctgcgcttgttcagggagaggaaggtggtaagccatctccaagacaaatatgtcttcatcacgggctgtgactcaggctttgggaacctgctggccagacagctggacaggagaggcatgagggtgctggctgcatgtctgactgagaagggagccgagcagctgaggagcaagacatcggacaggctggagacagtgatccttgatgtcaccaagacagagagtattgtggcagccactcagtgggtgaaggagcgagttgggaacacaggactctggggcctggtcaacaatgctggcatctccggccacctgggtcccaatgagtggatgaacaaacagaacattgcaagtgtgctggatgtgaacctgttgggcatgatcgaggtgactctgagcacggtgcccttagtgaggaaggcgaggggccgtgtggtcaacgttgccagcatcgcaggccgactgtctttttgtggtggtggttactgcatctccaagtatggtgtagaggccttctcagactccctcaggagagagctctcctattttggggtcaaggtggctattgtagagcctggcttcttcaggactgatgtgaccaatggtgtcacattatcatcaaacttccagatgctgtgggaccagaccagctcagaagtcagggaagtctatggcgagaactacctggcatcttatctgaaaatgctaaatggattggaccagaggtgcaacaaagatctgtctctggtgactgactgcatggagcacgccctgacttcctgtcaccctcgcacccggtactcagctggttgggatgccaagttcttctacctccccatgagctatctgcccacctttcttgtggatgcccttttctactggacttctccaaagcctgagaaagctctctgaagtctttacctatgtacataactgaggagatgttggtacagtgttagggaggggatcctgaggaggaggtcggagtgctgaggagggagggaggtcattcctctggggtttagtccacactcttcattttgctaattttcctgtgctactactcaaggctgactcgactgacccaagaaatagccaaagaattctgcgaagaagttcaaatacaaaagtgctggcagttgcctagcctctgggcaccatgacctaccatggcgatccacacaaatggggagtttgagaccagcttgtaccaaacactgccctgggtccccctgtgcaggaagtgcacatgccctggctagtttgtaccctatgcagcatagaagtgtccctgctctgaagtcacctgtgaccctggtgtcaggtttgagaagaatcactaataattctaacactcatgcttgaaggccaggtcgcagcctgggtgggagagtcggttacttgtggtgagaatatagtagaggatagagacattaattttttttaaatttactttgaagtcatggctcttcttttcttttttggagtcttttcctttttagagcatagcatgaggtgacctcttgttccctgtgatttaaacaatggcattgctggttggtgaggtttggattgcaggggtaaggggaatgtcctgagaagggtgtgcataggccagcaggaatttccttgcccgtctcagcccttctagccactgaggtgggaataactgctgtccattcaaaacttaacaacaacccctaaggcataagagcatgcatgcaggcc

SEQ ID NO: 522 - DNA, 807 bp, Rattus norvegicus (Norway rat)
gtatataagaaattctcaagttaataaaaaaaaaagaaatgtttttcacaaaggcagtatacttgtagcaggccatgcctcggtaaataaacagataaaattgagctgagatgttcccaatgcccatttgtcctgtgtatctttcattgtgttcttgccaacatctagggtggggtaatggaatagtcaatgagaaggtcaccagcagcccaagcacgaactctggtgttcaatctagacaatgacagacaggaacaactagagttgcataaccttgaggagaggtgggtttagtctcaaaagtcctgctggagtgttcagtgaagcagacactgattagaccaggaccatggaacctagtgtcctacttctccttgctgtcctcctcagcttcttgctactcctggtcaggggccatgcaaagatccatggtcgtcttccaccaggaccctgccctgtaccccttttgggaaatctcttgcagatggacagaagaggcctcctcaagtcttttattcagttgagacctatatggggtcttagtgtgcgcttctctgtgcttttatctttggaggtcactcagtggaaaagcaagggactccttccaggctgtaggttcatgttggaaggttgctggggggagagtgagatgctgactggtgctatatgctgactcttgttcaaatcaatgtgtgagtcttgttttattggaattttttggggcactttgcttggaggtgtagagctattgaggtgtagatgtgtaagcacgtataatttcacttgttggagtttgtccattctaga

SEQ ID NO: 523 - DNA, 1139 bp, Rattus norvegicus (Norway rat)
cctgctgtagcttgcccatctcccgctcccacaatccggcgtgatggctgccgccgttcctggcgccgtttcgctctccccactgctgtccgttctccttggcctgctgctcctctctgctcctcatggcgccagcggcctgcacacgaagggcgcccttcccttggacacagtcactttctacaaggtcattcccaaaagcaagttcgtcttggtgaagttcgacacccagtacccctatggagagaagcaagatgagtttaagcgtctggctgagaactcagcctccagcgatgatctcttggtggcagaggtggggatctcagactatggtgacaagctgaacatggagctgagtgagaagtacaagctggacaaagagagctacccagtcttctacctcttccgggatggggactttgagaatcctgtcccatacagcggggcagttaaagttggagccatccagcgctggctcaaggggcagggagtctatctgggcatgcctggatgtctgcctgcgtacgatgccctggcgggccagttcatcgaggcctccagcagagaggcccgccaggccatcctgaaacaggggcaggatggcctctcaggtgtgaaggagacagacaagaagtgggccagtcagtacctgaagatcatggggaagatcttggaccaaggtgaagacttcccggcctccgagctggcccggatcagtaagctcattgagaacaagatgagtgagggtaagaaggaagagctgcagaggagcctcaacatcctcaccgccttccgcaagaaaggcgccgagaaggaggagctgtgagggcaccaggctgctagggtttgctgagggcggggagggagagccgcctgctgactgtggggccctgtgggtggagggggcagtggagcaaagcagtcctgagccagagacctgtgccccgagtgcctggacactgaggctgctgagaccataccctggacatccttggtgcagtttgtggggagcctgtgtgccaagacaagatggctgtgtccccacaggagctggtactatagaggaaggtccttgacaggtatagttctgatcaaataaaagtctgttttgggttaaaaaaaaaaaaaaaaaaaaaaaa

SEQ ID NO: 524 - DNA, 1470 bp, Rattus norvegicus (Norway rat)
gcggctacggcgtgcggggagctgaggtaaagccggggctagtacggtaccaggcggtgcacgagctggctaagccagatttgtaaaaatggagtttcaagccgtagttatggccgtcggtgggggatctcggatgacagacttgacttccagcattcccaagcctctgcttccagttggaaacaaacctttaatttggtacccgctgaacctgcttgagcgagttggatttgaagaagtcatcgtggttacaaccaaagatgtccaaaaggctctgtgtgcagagttcaagatgaaattgaagccagatattgtgtgcattcctgatgaggcagacatggggactgcagattctctacgccacatatatccaaaacttaagactgatgtgctggtcctgggctgcgatctgataacagatgttgccttacacgaggttgtggacctgttcagagcttacgatgcatcacttgccatgttaatgaggaaaggacaagagagcacagaaccagttccaggtcagaaggggaaaaaaaaaacagtggagcagcgtgacttcattggagtggacagcacaggaaaaaggctgctctttatggctaatgaagcagacttggatgaagagctggtcattaagggatccatcctgcagaagcaccctaggatacatttccagacaggccttgtggatgctcatctctactgcttgaagaaatatgttgtggatttcttaatggaaaataagtcaatcacttctatccgaagcgaactgattccgtacctagtaagaaaacagttttcctcagcctcctcacagcaaaggcaggaagacaaagaagaggatctaaagaaaaaggagcccaagtctttagatatttacagttttataaaaaaagacaacactctgactttggctccctatgatgcctgctggaatgcttttcgaagagacaagtgggaagatttgtctagatcacaggttcgctgctatgtccacatcatgaaggaaggactttgctctcgagtaagcacactgggactctacatggaagccaacagacaggtacccaaattgctgtctgttctttgtcctgaggaatcaatgatccatccatcagcccagattgccaacaaacacctgattggagccgacagccttatcgggtcagatacacaagttggagagaagtcatctattaagcgatctgtcattggctcatcctgtgtcatcagagacagagtaactgttaccaactgccttctcatgaactctgtcaccgtgggagaagggagcagcatccatggcagcgtcatcttcaacaacgccgtggtcgaggcgggcgcggagatcagggactgtttaattggaagtggtcagaggattgaagccaaagctaaacgcatgaacgaggtgatcgtgggaaatgaccagctcatggagatctgaatcctgaacaagtctgaccccac

SEQ ID NO: 525 - DNA, 238 bp, Rattus norvegicus (rat)
ttggctcatcctgtgtcatcagagacagagtaactgttaccaactgccttctcatgaactctgtcaccgtgggagaagggagcagcatccatggcagcgtcatcttcaacaacgccgtggtcgaggcgggcgcggagatcagggactgtttaattggaagtggtcagaggattgaagccaaagctaaacgcatgaacgaggtgatcgtgggaaatgaccagctcatggagatctgaat

SEQ ID NO: 526 - DNA, 1806 bp, Rattus norvegicus (Norway rat)
ggaatatcagccatgcttgtcacagcgggttccctactaggggccatttggaccgtgctccatctccggattttgctgctggctgctgtcacctttctgttcctggctgatttcctcaaacaccggcgccccaagaactacccgccagggccttggcgcctgcccttagtgggttgcttgttccatttggatcctaaacagccacacctatcccttcagcagtttgtgaagaaatatgggaatgttttaagcctggattttgctaacattccttcagtggttgtaactggcatgcccttaatcaaagaaatctttactcaaatggagcacaattttttgaatcgccctgtcactcttctccgaaaacatctctttaacaaaaatggattgatcttctccagtggccagacatggaaggagcaaaggaggtttgccctgatgactctgaggaactttggactaggaaagaagagcttagagcagcgaatacaagaggaagcctaccaccttgtggaggccataaaagatgagggaggactgccttttgaccctcacttcaatatcaacaaagcagtctctaatatcatttgctctgtcacctttggggagcgctttgagtaccatgacagtcagtttcaggagatgctgaggctactggatgaggccatgtgtttggagtcatcaatgatgtgccagctctacaatatctttccaaggatacttcagtatcttcctggatcacaccaaacacttttcagcaactggagaaaactgaagttgtttatttctgatattattaagaatcaccggagagactgggatccagatgagccaagggacttcattgatgctttcctcaaggaaatggcaaagtacccagacaagactactacaagtttcaatgaagaaaacctcatctgcagtactttggatcttttctttgctggtacagagacaacatccactacactgcgctgggctctgctctgcatggccctgtacccagaagtccaagaaaaaatgcaggctgagattgacagagtgattggccaaggaagacagccaaacctggcagaccgagactccatgccctacaccaacgccgtcattcacgaggtgcagagaataggcaacatcatcccctttaatgttcccagggaagtggcagttgacacctatttggctggatttaacttgccaaagggaccctaaagagtgggccaccccggacaccttcaacccagagcactttttggagaatggacagtttaagaagagagaatcctttctgcctttctcaatgggaaagcgagcatgtcttggagaacaactggccaggtccgagctgttcatttttatcacttctcttatccaaaaatttaccttcaagcccccggtcaacgagaaggttagtctgcaattcagaatgtccgtcaccatttccccagtcagtcaccgcctttgcgcaattcctaggctgtgatgtcgaagaggaaagtatgaagaaatggcatctgcatggaggacactggtgtctgctcacattgaggggatagaattaaagatgactgagggagtgtgtgcaatgagactaaggaaattgaatcaagttatgggttcattaagtagaaagccacttgtgagctcaatggtacagcttcacgactgacatcttgcagagaaaaatgattcttccagaaaagaaaatgattacgggatcatggagaatggattaagtgactatgtaaatcataaaaacgatcataaaatttatacctttactttgaaaaaaaaaaaaaaaaaaaa

SEQ ID NO: 527 - DNA, 847 bp, Rattus norvegicus (Norway rat)
acgagctagacctccctagctccgcccgccgcgtgctcccgcctcccactcggaatgcctgtctggggcggtggaaataagtgcggggcctgcgggagaaccgtgtaccacgctgaagaggtgcagtgtgatgggcggacgttccaccgctgctgctttctgtgcatggtttgcaggaaaaatttagacagcacaacagtggcaattcatgatgaagagatctactgcaaatcatgctacggaaagaagtatggaccaaaaggctatggttatggccagggcgctggcacgctcaacatggaccgtggtgagaggctgggcatcaagccagagagtgctcaacctcacaggcctacaacaaatccaaacacttctaaatttgcccagaaatatggaggtgctgagaagtgctccagatgtggggattctgtgtatgctgctgagaagatcattggagctggaaagccctggcacaaaaactgtttccgatgtgccaagtgtgggaagagtctggagtctacaactctgactgagaaggaaggtgaaatctactgtaaagggtgctacgcaaagaactttgggcccaagggattcggctatggtcaaggagcaggggcccttgttcatgctcagtagtggtgtaaacccagtaagcatggcaaagaacctccattaatgtggatggccttaccgcactcaggctgtgcatcggccagcactcagcactgtgtagcacacacgctatgtgcacaatcgggctggacaggaagcactacactctcctgcccatccgctaacgtttaagaacgttcttttacatttggaataaaattttggtttgatttga

SEQ ID NO: 528 - DNA, 1563 bp, Rattus norvegicus (Norway rat)
cgcctcgggggctggagccacttggtagaagaacagcttctttggattttttttccccggtgggatactggcagttcaaagcgaaaccgttgaaatgcataacctgcaaacactgccccctaaaccacccaagcccacttctatagccaacaacagcatgaacaacaatatgtccttacaggatgctgaatggtactggggagatatctcaagggaagaagtaaatgaaaaactccgagacactgctgatgggacctttctggtacgagatgcatccactaaaatgcacggtgactacactctcacactaaggaaaggaggaaataacaaatcaatcaaaatctttcaccgagatgggaaatacggtttctctgatccattaaccttcaactctgtggttgaattaataacccactaccggaatgagtccttagctcagtacaatcccaagctggatgtgaagttactctacccagtgtctaaataccagcaggatcaagttgtcaaggaagataatattgaagctgtagggaaaaaattacatgaatataatactcaatttcaagaaaaaagtcgggaatatgatagattatatgaggaatacatccgtacttcccaggaaatacagatgaaaagaacagctatcgaagcatttaatgaaaccataaaaatattcgaagagcagtgccaaacccaggagcggtacagcaaagaatacatagagaagtttaaacgcgaaggcaacgagaaggaaattcaaaggataatgcataatcacgataagctgaagtctcggatcagcgagatcatcgacagcaggaggagactggaggaagacttgaagaagcaggcagccgagtatcgcgagatcgacaagcgcatgaatagcattaagccggacctcattcagctgagaaagacaagagatcaatacttgatgtggctgacgcagaaaggggtccggcagaagaagctgaacgaatggttgggaaacgaaaacacagaagaccaatactcactgctagaagatgacgaggatttgccccaccatgatgagaagacgtggaatgtggggagcagcaaccgaaacaaagccgagaacctattgcgagggaaacgagatggcactttcctggtccgggagagcagtaagcagggctgctatgcctgctctgtagtggtagatggcgaagtcaaacattgcgtcatcaacaagactgccaccggctatggcttcgccgagccctacaacctgtacagctccctgaaagagctggtgctacattaccaacacacctccctggtgcagcacaatgactccctcaatgtcacactagcatacccagtatatgcacaacagaggcgatgaagcgctgccctccctcggatacagttcctcaccttcaagccacccaaggcctctgggaagcaaagggctcctctccagcccgacctgtgaactgagctgcggaatcgaagccggatgtctgcacatgggactagagctttcttggacaaaaagaagtcggggaagacatgcagcctagggctgttggatgaccg

SEQ ID NO: 529 - DNA, 530 bp, Rattus norvegicus (Norway rat)
tctagagaagggggagcggttggcacagccccagatctgcaccattgacgtctacatggtcatggtcaagtgctggatgattgatgagaatattcgcccaacctttaaagaactagccaatgagtttaccaggatggcccgtgacccaccaaggtatctggtcatcaagagagcgagtgggcctggaacacctcctgcggcagaaccctctgttctgaccaccaaagagttgcaggaggcagagctggagccagaactggacctagacctagacttggaggcagaggaggagggcctggccacctccctgggttctgctcccagcttgcctacgggaacgctcacccggccacgtgggagccagagccttttaagtccctcatctgggtacatgcccatgaaccagagcagtctcggagaggcttgtctggattctgcggttttggggggtcgtgaacagttctcccgtcccatctctctgcacccaattccacgggggcgtccagcatcagagtcatcagaggggcata

SEQ ID NO: 530 - DNA, 1728 bp, Rattus norvegicus (Norway rat)
aatctagcaaaatcaatccataatctctatttatttgttgaaaatgttgatcttaaccaaatcagtagtagtggtgcgtcttggatccaaaatgtggataccaaatatcaaatcagaatccagatacaagaaaaactccagcatctcagaacacagattcataatatagacattcaacagcttgctgcagagttaaaacaacagattgaagctcttgatgtcccaatgcatttagatcaactgagaactgcaattctattccaaagaataagtgtcattattgagcgtgtcaaatactttgttatgaatcttattgaagattttaaagtaactgagaaaatcaatacttttagagttatagtccgtgagttaattgagaaatatgaagtagaccgacaaatccaggttttaatggataaatcaatagagttggcccacagatacagcctgagtgagcctcttcagaaactaagtaatgtgctacagcaaattgagataaaagactactatgataaattggttggttttattgatgacactgtcgagtggattaaagcagtgtctttcaaaaatatcattgaagaactgaatagattgattgacatgtcggtaaaaaagttgaaagcctttgattatcaccagtttgtagacaaaaccaacagcaaaatccgtgagatgactcagagaatcaatgctgaaatccaagctctcgaactcccacagaaaactgaagcattaaaactgtgggtagaagacttcaaaaccacggtctccaactccctggaaaaactcaaggacaccaaagtaactgtggtcgttgattggctgcaggatggtttggctcaaataaaagcccaattccaagatgctttagaagatgtacgagaccgaatttatcaaatggacattcagggggaactggagcgctgcttgtctctggtaagccaagtttacagcacagtggtcacctacatttctgactggtggactctgactgctaaaaacataacagactttgcagagcaatattccacccaaaagtgggctgagagtgtgaaagcactggtggaacaaggattcattgttcctgaaatccaaacatttctggggaccatgcctgcatttgaggtcagtctccacgctctccaagaagctaactttcagactcctgactttatagtccccttgacagatttgaggattccatcaatttggataaacttcaaaatgttaaagaatgtaaaaatcccattgagattttccactccagaattcactctcctcaacaccttccgtgtccgttcctttacaattacgttgctggaaataaaagcaaagatcattcgaactatcgaccaaatgctgagcagtgagctacagtggcctcttccagaagtgtatttgagagccctggagatggtgaacatttctcttgcaagactctctctgccagacttccatgtaccagaaatcacaattccagaattcacaatcccaaatgtcaatctcaaagatttacaggttcctgatcttcacataccagaattccagcttcctcacctctcatgcacaactgaaatacctgctttcggcaaactacatagcgtcctgaaaatccaatctcccctctttatattagatgctagtgccaacatacagaacataactacttcagagaacaaagcagagattgtggcttctgtcactgccagaggagagtccaaattt

SEQ ID NO: 531 - DNA, 3726 bp, Rattus norvegicus (Norway rat)
atgcctcacttcaccgtggtgccggtggacgggccgcgacgcggcgactatgacaacctcgaggggctcagttgggtggactacggggagcgcgccgagcgggaagactcggatggacagggtaaccacagagagaatagtcccttccttagccctttggacgcctccagaggaaatgactactatgaccggaacctggcactgtttgaggaggagctggacatccgcccaaaggtatcatctctcctgggcaagcttgtcagctataccaacctcacccaaggagccaaggagcacgaggaagctgagagtggagaaggtggccgtcggagagccgccaaggcacccagcatgggcacccttatgggagtgtacctgccctgcctgcagaatatcttcggggtcatcctcttcctgcggctgacctggatggtgggcacagctggcgtgctgcaggctctcctcattgtcctcatctgttgctgctgtaccctgctgacagccatctccatgagtgccatcgccaccaatggtgtggttccagctggtggctcttacttcatgatttcccgctctttgggaccagaattcggaggtgctgtgggcctatgcttctacctggggaccacatttgcagcagccatgtatatcctaggagccattgagatcttgctgacctacattgctccaccagctgccatcttttacccatcgggcacacacgacatgtcaagcgccaccttgaataacatgcgggtgtacggaaccattttcctgactttcatgaccctagtggtgtttgtcggtgtcaagtatgtgaacaagttcgcctcactcttcctggcctgtgtgatcatctccatcctctccatttacgtgggaggcatcaagtccgcttttgaccctcctgtttttccggtgtgcatgctgggcaataggactctgtctcgggaccagtttgacatctgtgccaagacagttgtggtggacaatgagacagtggccacccggctgtggactttcttctgccacagccccaaccttactgctgactcctgtgacccctacttcctgctcaacaatgtgacagagattcctggcatacctggggcagctgctggtgtgctccaggaaaacctgtggagtgcttacctggagaagggtgaggttgtggagaagcatgggctgccctccacagatacccttggcctgaaggagagcctgtccctgtatgtggtggccgacatcgccacatccttcaccgtgctggttggcatctttttcccttctgtaacaggcatcatggctggctcaaaccgttccggggacctccgtgatgctcagaagtctatccctgtggggaccattctggctattgtcaccacttcactcgtgtacttcagcagtgtgattctcttcggtgcctgcatcgagggtgtggtgctccgggacaagtacggtgatggcgtcagcaggaacctggtggtaggcaccttggcctggccttcaccttgggtcatcgtggtcggctccttcttctcaacatgtggtgccggcctccaaagtctcactggggcgccacgtttactgcaagccattgccaaggataacatcatccccttcctccgggtgtttggccacgggaaagccaatggtgagccaacgtgggccctcctcctgacagcgctcatcgctgagctgggcatcctcatcgcctcccttgacatggtggcccccattctttccatgttctttctgatgtgttacctctttgtaaacttggcctgtgctgtgcagacacttctgaggacccccaactggcggccccggttcaagtactatcactgggcgttgtctttcctgggcatgagtctgtgcctggctctcatgtttgtctcctcctggtactacgccctagtggccatggtcatcgcaggcatgatctacaagtacatcgagtaccaaggggctgagaaggagtggggtgatgggatccgaggcctgtccctgagtgccgcacgatatgcactgctgagactagaggaagggcctcctcacacgaagaactggcggcctcagctcctggtgctgctgaagttagacgaagatcttcatgtgaagtaccctcggctcctcacctttgcctcccaacttaaggctgggaaaggcctgacaatcgttggctctgtcatccagggcagctttctggagagctatggggaagcccaggctgctgagcagacaatcaagaacatgatggagattgagaaagtaaaaggcttctgccaggtagtggtggccagcaaggttcgagaggggctggcccacctcatccagtcttgcggcctgggtggcatgagacataactccgtggtgctgggctggccctatggctggcgacagagtgaggacccacgtgcctggaagacctttatcgacactgtgcgctgcaccacagctgcccacctggccctgctggtgccaaagaacatagctttctaccccagcaaccacgagcgctacctggagggccacattgatgtgtggtggatcgtgcatgacggaggcatgctgatgctgctgcccttcctgctgcgccagcataaggtttggaagaagtgccggatgcgcattttcaccgtggcccagatggacgacaacagcatccagatgaagaaggatctggccatcttcctgtatcacctccgcctggaagctgaagtggaggtggtagagatgcacaacagtgacatctcggcctacacctacgagcggacactgatgatggagcagcggtctcaaatgctgcgacagatgaggctgaccaaaacagagcgggatcgagaggcccagctggtgaaggacaggcactcggctctgaggctagagagcctctactccgacgaggaggatgagtctgtgacaggcgctgacaagatccagatgacatggaccagagacaagtacatggctgaaccctgggaccccagccatgcccctgacaacttccgggagctggtgcacattaagccggaccagtccaatgtgcggcgtatgcacactgctgtgaagctcaatgaagtcattgtcacacgctcccatgatgcccgcctggtcctactgaacatgcccggcccccctaagaacagtgagggtgatgagaactacatggaattccttgaagtcctaaccgagggccttgaacgggtgttgttggtgcgtggtggtggccgggaagtcatcaccatctattcttgagcccgatggagtcttgtggcctggagttgggttgtctaagacaacagtgcccagccttgcacctacttgccagttctgccttgcccagccttgctttggactagctttgctaggtctccagggaaaccaagcttgggccttgcaatgggaatggatccgagggcccacgggacctggaggatttagggactttcccctcccatactccaagggaggcctctcctgactcgagatgactggtgagggctgatgtgggatttgaagtcccagactggctcacaagtgctatttattgtatatttattgtgtggatgtcatcatttcagaaaggggggagacaataaaagggggagccgagctgggcctgtctgcaggaagatctggctcaggctgctgtgggcagcatcaagccaagtggaatggagctggccaagctgagcctgacttttttcaataaaacctcgtgcc

SEQ ID NO: 532 - DNA, 6075 bp, Rattus norvegicus (Norway rat)
  misc_feature (28)..(28): n
agcgggtcggtccacccgagaaaggggngcggaggaactgggaccgacccgggaagactgcgccagaggtgcacagagatcgcgcggggagcgaggagccgggcctcggcgctcagcccggatccacgtcccgcgaagcaccggctccggccggccgcggggtcatgacgtacagcgagctctacagccggtacacgagggtctggatccccgacccagatgaggtgtggcgctcggctgaactaaccaaggactacaaagatggggatgagagcctacaactcagactggaagatgacacaattctggattacccaatcgatgtccaaaataaccaggtgccattcttgcggaatccagatatcttagtaggagaaaacgacctcactgcactcagccatctccacgagcccgcagttctgcataacttaaaggtccgtttcctggagtctaaccacatctacacttactgtggaattgtgcttgttgccattaatccctatgagcagctgccaatctacgggcaggatgtcatctatgcctacagtggccaaaatatgggcgacatggatccccacatctttgctgtagcagaagaagcctacaagcagatggccagagatgaaaagaaccaatccatcatagtcagcggagagtctggagcagggaagaccgtgtcagccaagtatgccatgcgctattttgccacagttgggggctcagccagtgataccaacatcgaagagaaggtcctggcttccagtcccatcatggaggccatcgggaatgccaagacaactcgcaacgacaatagcagccgatttgggaagtacattgagatcggctttgataaaaagtaccacatcatcggggccaacatgaggacctatttgctggagaagtccagggtggtctttcaggcggatgatgagaggaactaccacatcttttaccagctctgtgctgcggccagccttcctgagtttaaggagctcgcactaacatgtgcagaggactttttctacaccgcccatggaggaaacacgaccatcgagggtgtagatgatgcagaggactttgagaagacaagacaagccctcacactccttggagttcgggagtcccatcaaatcagcatctttaagataattgcttctatcttgcaccttggaagtgtggagatccaggccgagcgggatggggactcctgcagtatatcgccccaggacgaacacctgagcaacttctgccgcctgctaggaatagagcacagtcagatggagcactggctgtgtcatcggaagctggtcaccacctccgagacctacgtcaagaccatgtccctgcagcaagtggtcaacgcacgcaatgccttggccaagcacatctatgcccagctgttctcctggattgtggagcacatcaacaaggccctgcaaacctcccttaaacaacactccttcatcggggtcctggatatttatgggtttgagaccttcgagattaatagcttcgagcagttttgtatcaactatgccaacgaaaagctccagcaacagttcaactcgcatgtgttcaagctggagcaagaagagtatatgaaggagcagatcccgtggaccttgattgacttctatgataaccaaccgtgcatagacctcatagaagccaagctgggtatcctggacctgttggatgaggagtgtaaggtccccaaaggaactgatcagaactgggctcagaaactctatgaacggcactccaacagtcaacacttccagaaaccacgcatgtccaacacggccttcattgtcatccactttgcagacaaggtggaatacctttcagatggttttctggagaaaaacagggacacggtatatgaagaacagatcaacatcctgaaagcgagcaagtttccgctagtggctgatttgttccgtgatgacgaggactctgttcctgccaccaacacagctaagagtcggtcatcttcaaagatcaatgttcgttcttccagacccctcatgaaggcccccaacaaggagcacaagaaatccgtgggctaccagttccgcacttccctaaacctgcttatggagactctgaatgccacaacgccccactacgttcgatgcatcaagcccaacgacgaaaagctccccttccacttcgacccaaagagagctgtgcagcagctcagagcctgcggcgtgttggagaccattcggatcagcgcggcaggctacccgtccaggtggacctaccatgacttcttcaaccggtatcgggtgttgatgaagaagagagagcttgccaacaccaccgacaagaagaatatctgcaagtctgtcctggagagtctcatcaaggatccagacaagttccagtttggccgcaccaagatcttcttccgggcaggtcaggtggcctacctggagaagcttcgggcagacaagttccgggaggccaccatcatgatccaaaagacggtcaggggctggctgcagagagtgaagtaccggaggctgagagcagctacgctaaccctgcagagattctgccgaggatacttagcccgcagactgactgagcacttgaggagaacccgggcggccatagtgttccagaagcagtaccgcatgctgaaggcccgccgagcctactgcagggtccgcagggctgcggtcatcatccagtcctacacgaggggccatgtgtgtacgcagaagctaccgccagtcctcacggagcacaaagccaccatcatccagaagtacgcccggggctggatggcacggagacattttcagcggcagcgggatgcagccattgtcatccagtgtgccttccggaggctcaaggccaggcaggcactgaaggccctcaagatcgaggcccgttctgcagagcatctgaaacgcctcaacgtgggcatggagaacaaagttgtccagctgcagcggaagattgatgaccagaacaaagagttcaagactctgtcagagcagttgtctgcagttacctccacccatgccatggaggtggagaagctgaagaaggagctggcgcgttaccagcagaaccaggaggctgaccccagccttcagctgcaggaggaggtacagagcctgcgcaccgaactacagaaggctcattcagagcgcagggtcctagaggatgctcacaacagggagaatggtgaactgagaaagcgagtcgcagacctggaacatgaaaatgcactcttgaaggatgagaaagaacaccttaaccaccaaatcctgcgccagtcaaaagctgaatcttcacagagctctgtggaggaaaacctgctgattaagaaggaactggaggaggaacggtcccggtaccagaacctcgtgaaggagtactcccagctggagcagagatatgagaaccttcgggacgagcagcaaactccaggccacaggaagaacccatcaaatcaaagtagcttagaatctgactccaattacccctccatttccacctcagaaatcggagacaccgaggatgccctacagcaggtggaggagattggtatagagaaggcagccatggacatgactgtcttcttgaagctgcagaagagagtgcgggaacttgagcaggagaggaagaagctgcaggtgcagctagaaaaggaacaacaggacagcaagaaagtgcaggtagaacaacaaaacaatggcctagatgtggaccaggatgcagatatagcctacaatagtctgaagagacaagagctcgagtcagagaacaagaagctgaagaatgatctgaatgagcgctggaaggctgtagccgaccaagccatgcaggataactccactcatagctcccccgacagctacagcctcctactgaaccagctcaagctggccaacgaggagctggaggtccgcaaagaggaggtgctgatcctcaggacccagatcatgaatgctgaccagcgcagactgtccggcaagaacatggagccgaacatcaatgccagaacaagttggcccaacagcgagaagcacgtggaccaggaagatgccattgaggcctatcacggggtctgccagacaaacagccagactgaggattggggatatttgaatgaagatggagaactcggcttggcttaccaaggcctaaagcaagtcgccaggttgctggaggcccagctgcaggcccagaacctgaagcatgaggaggaggtggagcatctcaaggcccaggtggaggccatgaaggaggagatggacaaacagcagcagaccttctgccagactctgctgctctccccagaggcccaggtagaatttggtgtccagcaggagatatcccggctgaccaatgagaacctggactttaaggagttggtggaaaagctggagaagaatgagaagaagctgaaaaagcagctgaagatttacatgaagaaggtccaggacttagaagctgcccaggcattggcacagagtgacaggaggcaccatgaactcacaagacaggtcacggtccaacgaaaagagaaggacttccaaggcatgctggagtaccacaaagaggacgaggcactccttatccggaacctggtgacagacctgaagccccagatgctgtcgggcaccgtgccctgtctgcctgcatacatactctacatgtgcatcaggcacgcggactacaccaacgatgacctcaaggtgcactcgttgctgagctccaccatcaatggcattaagaaagtcctcaagaagcacaatgaggactttgagatgacgtcattctggttatccaacacctgccgcctccttcactgtttgaagcagtacagtggggatgagggtttcatgacacagaacacggcgaagcagaatgagcactgtctcaagaactttgacctcactgaataccgtcaggtgctaagtgacctttccattcagatctatcagcaactcattaaaattgctgagggcctgctacagcctatgatagtttctgccatgctggaaaatgagagtatccaggggctgtcaggggtgaggccaactggctaccggaagcgctcgtccagcatggtggacggagaaaattcgtattgcctggaggccatcatccgccagatgaatttctttcatacagtcctgtgtgaccagggcctggaccccgagattatcctgcaggtgttcaaacagcttttctacatgatcaatgcggtgactcttaacaacctactcctgcggaaagatgcctgctcctggagcaccggcatgcaactcaggtacaacataagtcaactcgaagagtggcttcggggaaaaaaccttcagcagagtggagcggttcagaccatggagcccttgatccaggcagcccaactccttcagctgaagaagaagacccaggaggatgctgaggccatctgctctctgtgtacctccctcagcacccagcagattgtcaaaattttaaacctctacactcccttgaatggatttgaagaacgggtgacagtgtcctttatacgaacaatccaggctcagctacaagagaggagtgacccccagcagctactgctggactccaaacacatgtttcctgttctgtttccatttaatccatctgctctgaccatggactcaatccacatcccggcctgtctcaatctggagttcctcaatgaagtctgaggatgcgttgtttccaaggcaagcgagaaggaagtgcgtgctgtcggctgaaggagtgctaggtctgttaaatatgcccagcgtagatcaaaccatgttagagacctgtggggagcactgaactaaacagcggggtgcactctggtcgttagcttttgtacagactgctcagaaaacacctgaagtgaggacgattgttgcagtgggactttcaggttaaaccaagacacgtcagaacggacggccgctgtgtagctccagtcaccatacaaagatgccagttctacagagtggaagtgcctagctttgagctgtgtatataacttaagaatgttcaaactaagattatattaaaaacacatgacataaa

SEQ ID NO: 533 - DNA, 1201 bp, Rattus norvegicus (Norway rat)
agatggcggcagccgaggccgcgaactgcatcatggaggtttcctgtggccaagcagaaagtagtgagaagcccaatgctgaggacatgacatccaaagactactactttgactcctatgcccactttggcatccacgaggagatgctaaaggatgaggtgcgaaccctcacgtaccgcaactccatgtttcacaatcggcatctcttcaaagacaaggtggtgctggatgtgggctcgggcactggcatcctctgcatgttcgctgccaaggcaggggcccgcaaggtcattgggatcgagtgctccagtatctctgattatgctgtgaagattgtcaaagccaataagttagaccacgtggtgaccatcatcaagggcaaggtggaggaggtggagctgcctgtggagaaggtggacatcatcatcagcgagtggatgggttattgcctcttctatgagtccatgctcaacactgtgctgcacgctcgtgacaagtggctggcacctgatggcctcatcttcccagaccgagccaccctgtatgtgacagccattgaggaccgacagtataaagactacaagatccactggtgggagaatgtatatggctttgatatgtcctgcattaaagacgtggccatcaaggagcccctggtggacgtggtggacccaaagcagctggtcaccaacgcctgcctcataaaggaggtggacatctacacagtcaaggtggaggacctgaccttcacctccccgttttgtctgcaagtgaagaggaatgactatgtgcatgcactagtggcctacttcaacatcgagttcacccgatgccacaagaggaccggcttctctaccagtcctgagtctccatacacacattggaagcagactgtgttctacatggaggactacctaacagtgaagaccggcgaggagatttttggcactattggaatgaggcccaacgccaaaaacaatcgtgacttggactttaccatcgacctggacttcaagggtcagctgtgtgagctctcttgttccaccgactaccggatgcgctgaggaggtgccaggctggccctcctgcaaaagggggctcaggggctgggcttgggggatgggagggtacatcgtggcagtgtttttcataacttatgtttttatatggttgcgtttatgccaataaatcctcagctgac

SEQ ID NO: 534 - DNA, 2196 bp, Rattus norvegicus (Norway rat)
aattcggcacgagcaaacggagaggccgcgggaggcgcgaagccggcagaaggcgagggagagcggagggcggccatggtccagccctgaagccaaacaaaaaaggcctacttcgaaagctgtcaacaatgaatgactctaaagatgcccctaagtcctatgacttcgacctgatcatcattggaggaggctcgggaggcctggcggcagctaaggaggcagccaaatttgacaagaaggtgatggtcttggacttcgtcacaccaactcctctcggaacgaatgggggtctcgggggaacgtgtgtgaacgtgggctgcatacctaaaaaactgatgcaccaggcggctctgttaggacaagctctgaaagactcacgcaactatggctggaaactcgaggacacagttaagcatgactgggagaaaatgacagaatctgtgcagaatcatatcggctcgctgaactggggctaccgagtagctctccgggagaagaaggtcgtctatgagaatgcttacgggaaattcattggtcctcacaaaattatggcaacaaataacaaaggtaaagaaaaagtttactcagcagagcggttcctcattgccaccggtgaaaggccacgctacctgggcatccctggagacaaagagtactgcatcagcagtgacgatcttttctccttgccttactgcccggggaagaccctagtggttggcgcgtcctatgtcgccttggaatgtgcaggattcctggctggtatcggcctcgacgtcactgtaatggtgcggtccattctccttagaggatttgaccaggacatggccaacaaaattggtgaacacatggaagagcatggtatcaagtttatcaggcagttcgtgccgacgaaaattgaacagattgaagcagggacaccaggccgactcaaggtgaccgctaaatccacaaacagtgaggagaccatagaagacgaatttaacacagtgttgcttgcagtaggaagagattcttgtacaagaactattggcttagagaccgtgggcgtgaagatcaatgaaaagaccgggaagatacctgtcacggatgaggagcagaccaatgtgccttacatctacgccattggtgacattctggaggggaagctggagctgacccccgtggccatccaggcggggagattgctggctcagaggctgtatggcggctccactgtcaaatgtgactatgacaatgtcccaacgactgtgtttactcctttggagtatggctgctgtggcctctctgaagaaaaagctgtagagaaatttggggaagaaaatattgaagtttatcacagtttcttctggccattggaatggacagttccatcccgggataacaacaaatgttatgcaaaagtcatctgtaaccttaaagacaacgaacgtgtcgtgggcttccacgtactgggtccaaatgctggagaggtgacgcagggctttgcagccgcactcaagtgcgggctgaccaagcagcagctggacagcaccattggcatccacccggtctgtgcagagatatttacaacgctgtcggtgactaagcgttctgggggagacatcctccagtctggctgctgaggttaagccccagtgtggatgctgttgccaagactacagaccattgcttgcttccttgtccacacccaggtgaagttcaggaaggctcttgggttcttggcaccaattcaaggtgctatcctaaggccaccaggtccctgggatcttgtgggtaggaggtggcaggtagaagaaggctgcagcatcgcactggggtcaccatgacggactcagactgacattcggcagagcatcacggtgcgtccatgaagtcactagcctcaagcccaagtggtgggcagtgacagaaagctgtcgatctgttgggttcaacctttccctgtagactgttttagtctcgccttcaagctatgtaatgtcaattctgttttttcttttctccatggggttaatgatactagaggtagggaatgttagcaatcagtttttgtcatggctggactatccacagcacggtcgttactgtgtggaagggggtcagatggcttatgagagccaaaccagtttatcctgagaaagacgaattaccctgtggctaaaatacactgtttttactaaaaaaaaaaaaaaaaaa

SEQ ID NO: 535 - DNA, 339 bp, Rattus norvegicus (Norway rat)
cggagaaaatgcatgccagggacttcacagtttctgctctggtaagagttgttggatttagtaatgctaattatagccattaagcaggattttactacaatatggctgctcagtgctgtgttgtcgttccccctgctcagaacaattgtttcttaactatacctgtctgctgtctacctgtagcagccagggacgcttggtctcatacatgatagaaagaaattaaatgaatgcctgacctgaatagggattgctgaattgagttgttgtatttgcagcatggtgacatggaccagaaggaaagagatgtcatcatgagggaattccgatcagggtcaa

SEQ ID NO: 536 - DNA, 990 bp, Rattus norvegicus (Norway rat)
atggtacaagctaagacctggaccctaaagaagcactttgaaggcttccctacggacagtaactttgagttgaggacgactgagctcccacccttaaataatggagaggtcctgctggaagccctgttcctctccgtggacccttacatgagagttgcagcaaaaaaactgaaggagggcgacagcatgatgggtgaacaagtggccagagttgtggaaagtaaaaactcagccttcccaacgggaacgattgttgtggctttattaggttggacatcacattccatttctgatgggaatggactgagaaagctacctgcagagtggcctgacaagctaccactgtctttggctttggggacagttggcatgccaggcctcactgcctactttggcctgcttgacatctgtggcttgaagggtggagaaacagtgctggtcaatgcggcagccggggctgtgggctctgttgtggggcagatagctaagctcaagggctgcaaagttgttggtacagccgggtctgatgaaaaggttgcctatcttaagaagcttggattcgatgtggcctttaactacaagacagtaaagtcattggaagaagctttgaggacagcctctccagatggttatgattgctactttgataatgtcggtggagagttttcaaacactgttatactgcagatgaagacgtttggaagaattgccatctgtggcgccatctctcaatacaaccgcactggcccatgtcccccaggcccatctccagaggtcattatctatcagcaactccgcatggaggggttcatcgttactcggtggcaaggagaagtccgccagaaggctctgacagacttgatgaattgggtttcagagggtaagatccggtatcatgaatacatcactgaaggatttgagaagatgcccgcagcgttcatgggaatgttgaaaggagacaatctggggaagactatagtgaaagcgtga

SEQ ID NO: 537 - DNA, 1018 bp, Rattus norvegicus (Norway rat)
tccaggctgcaccactggcaacaaaaaatgcaggccctactattcctgatggctcttctcttgccttctggagctggagctgaggagattatcggtggtgtggagtctagaccacactcccgtccttacatggcccatctggagatcaccactgagagaggttacaaggccacctgtggtgggtttcttgtgacccgccaatttgtgatgactgccgcacactgtaagggaagagaaaccactgttacccttggagttcatgatgtgagcaagacagaatccacacagcagaagataaaagtcgaaaaacaaattgttcacccaaattataacttctattccaatctccatgatatcatgttactgaagcttcaaaagaaagccaaggtgactcctgctgtggatgtaattcccctgcctcagccctctgactttctcaagcctgggaagatgtgccgggcagctggctgggggcaaactggagtgacaaaaccaacctcaaatacactgagggaggtgaaacagagaatcatggataaagaggcctgtaaaaactattttcattataactataacttccaggtctgcgtgggcagtccaagaaagataagatcagcatataagggagactccggaggaccactagtgtgtgctggggtggcccatggtattgtatcttatggacgtggagatgcaaagccccctgcagtcttcacccgaatctccccatatgtgccctggattaataaagtcataaagggcaaggatctgaccagcctgagtctgcacgagtcagagtctccaagctagagaactcttttgatatcccttgggatcaacaaagcctgtccccagcctgtcacctgcttgtcccatacctgttcccagcctgcccccaacttgcccccagcccatccccagcctgtcccaagcctgtccctaggatgatctcaacaatacacaagtctgtggtgatggattgttccctgtaaagcacctcaataaagacataacctca

SEQ ID NO: 538 - DNA, 1765 bp, Rattus norvegicus (Norway rat)
ttgaaaaggtactggaaactgaggaccctatctggatcaaagcagtttctgatggagccctcgcctcttgagctaccagttgatgcagtgcggcgcatcgcggctgaactcaattgtgacccaaccgatgagagggtggctctccgcttggatgaggaagataaactgaagcgttttaaggactgtttttatatccccaaaatgcgggacctgccttcaattgatctatctttagtgaatgaggatgataatgccatctatttcctgggaaattcccttggtcttcaaccgaagatggttaaaacatacctggaggaagagctagataagtgggccaaaataggagcctatggccatgaggtagggaaacgtccttggattataggagatgagagcattgtaacccttatgaaggacattgtaggagcccatgagaaagaaatagctctaatgaatgctttgactgttaatttacatctcctgctgttatcattctttaagcctacaccaaagcggcacaaaattcttctagaagccaaagccttcccttctgatcattatgcgatcgagtcacagattcaacttcatggacttgatgttgagaaaagtatgcggatgataaagccacgagagggggaagagaccttaagaatggaggacatactggaagtaattgagaaggaaggagactcaattgctgtggtcctgttcagtggcctgcacttttatactggacagctgttcaacattcctgccattacacaagccggacatgcaaagggctgttttgttggctttgacctagcgcatgcggttggaaatgttgaactccacttacatgactgggatgttgactttgcctgctggtgctcctacaagtatttaaattcaggagctggaggtctggctggtgccttcatccatgagaaacacgctcacacgatcaagccagcgttagtgggatggttcggccatgaactcagtacaagatttaacatggataacaaactacaattaatccccggggtcaatggattccgaatttccaaccctcccattctgttggtctgctccttgcatgccagtttagagatctttcagcaagcaactatgactgcgctgaggagaaaatccattctgctgacaggttatctggaatacttgctcaaacattaccatggcggaaatgacacagaaaacaagaggccagttgtgaacataatcaccccatccagagcagaggaacgaggctgccagctgacactgaccttttccatttccaagaaaggcgtttttaaggaactagaaaaaagaggagtcgtctgtgacaagcgagaaccagaaggcatccgggtggccccggttcctctctataattctttccatgatgtttataagttcatcagactgcttactgccatactcgactctacagaaagaaactagccatgctttctaaataactcaagtaaatctcacacactgggggttccacttctactgcattttagtcattcaaaagtctccagaaattgatggcatagaaatgatgatgattttataaacttacataaaacctggtacatgttttaatatctgtgtcgctgatgtgctgtggactaagaagtcacattttacatgactccaacctacagatgactgtcttgatcagctgtcaccttccatggtcactgaaaggttgtgtgtttaatttgtgactgaaatgacaacattaaaatgtatctggacttcttgtataaaaaaa

SEQ ID NO: 539 - DNA, 1748 bp, Rattus norvegicus (Norway rat)
cttagaacctggactcagaccttcataagagccacaaagaaaccaattctgaaccctatcttggctttggatcctggaagagaatcgctaaacacagagcagacccagtgagtgagcaggtgttttggacaatggactggttgagcccatctctattataaaaatgtctcagagcaaccgggagctggtggttgactttctctcctacaagctctcccagaaaggatacagctggagtcagtttagcgatgtcgaagagaacaggactgaagccccagaagaaactgaaccagaaagggagacccccagtgccatcaatggcaacccatcctggcacctggcggatagccccgcggtgaatggagccactggccacagcagcagtttggatgcgcgggaggtaatccccatggcagcagtgaagcaagcgctgagagaggctggcgatgagtttgaactgcggtaccggagagcattcagtgatctaacatcccagcttcatataaccccagggacagcatatcagagctttgaacaggtagtgaatgaactctttcgggatggggtaaactggggtcgcattgtggccttcttctcctttggcggggcactgtgcgtggaaagcgtagacaaggagatgcaggtattggtgagtcggattgcaagttggatggccacctacctgaatgaccacctagagccttggatccaggagaacggcggctgggtaagaaccacgccccttgtgtgtccgccccttgtgtgtctctcctctgtggagatccctaactgccctttttggtctcctggcatggttgttgaagatatcgattattcaggagacattcctggcttactttaataccaggggttaactttgggaatattgatgaccctgtttttaaggaacctgtatttttcattctggctacccttgtggccccgcagtttcatagttttgttccaatttctcggcaaagaaaaacagcctgtgtgtttacttggcttaaaacctaggagagtagcaagttctccctgtgttctgctcactctcacgtaatgggtcaccttggctggggggggaaggtaatataatacctggaggaactgcagagctgataaccccaggctcctgtgtgctcgcatgcatgctattcagaccatttggtcaggcaggagccccactggcttgactggctgaatattgtctgattttagagaaggtggtctgagccaattgtgtttgtgctgtgcccctaagttcattttcaccatggttggcttgtttggggagcccttgctgtgccccaggactttgtacctcactgccctggatcagttggggatctcccagctgctctggcccagtgtttttctgctcagggccctggggcctctttactaaagcactgtttgctgctggcagacacgaaccaggtctgtgaggctccataggaaattaagatttggtgacagactggacgtgggtgtgagtcctgaccctgtcacttaactggccatgtgaccttggtcaggctgacttaccttctgggcctcagcttctcacagactgttgtgactcttaaagataaagcgagcagaagctgacaccagtgagtgccttttcttctgctcacccttgtgctcaccagggtgagatagaggtgagaatgcccttactggtgaccactgtggtaggcatttaccgttcggagggaactccattctggaataggggagaatgcgac

SEQ ID NO: 540 - DNA, 1428 bp, Rattus norvegicus (Norway rat)
ctgtttctgctacttgctctttgtttcaaactgccttggagagtttctcacagtaccgtgtgcttcttgctaacttccggtttaagctttagtcgttctctagtctcttcagttttcaccctgagcctcgacactggactactgaaatcgtgtagtgaacgttggatgtgtcccaaaaaggtaatgtggaacacagccgtgcactcggaattcatacatgatcacgtggattacggctttcaaaactgcaagagtaaattcaattggcatgtcatcaaggagaagcgggatgcttacgtgagccgcctgaacaacatctaccaaaacaatttaaccaagtcccacatcgaagtcatccacggctacgcaacatttcgagatggtccccagcccacagcggaagtcaacgggaagaagttcactgctccgcacatcctgatcgccacgggtggtgtgcccacggttcctcatgagaaccagatcccaggtgccagcctggggataaccagtgatgggttctttcagctggaagacttgcccagccgcagcgttattgtgggtgccggttacattgccgtggagattgcgggcatcctctccgccctgggctccaagacgtctcttatgatcaggcatgataaggtgcttagaagctttgattcactcatcagttccaactgcaccgaggagctggagaacgctggcggtgttgaggttctcacagttaagaagttctcacaggttaaggaagtaaagaagacctcatcgggcttggaactccatgtggttactgcacttcccggtaggaaacccaccgtgaccacgattccagatgtcgattgcctgctctgggccattggacgggacccaaactctaagggcctgaatctaaataaactggggatacagactgatgacaaaggccatatcctagtggacgagttccagaataccaatgtcaaaggcgtctatgccgtgggcgatgtctgtgggaaagcacttctcaccccagttgcgatcgctgctggccggaaactcgcccatagactttttgagggcaaagaagattccaggttggactatgacaacatccctaccgtggtcttcagccacccgcctatcgggacagtggggctcactgaagatgaagccgtccataagtatggcaaagacaatgtgaaaatctactcgaccgccttcaccccgatgtatcacgctgtgaccacgaggaagacgaaatgcgtgatgaagatggtttgtgccaacaaagaggagaaggtggttggcatccatatgcaggggattggctgcgatgagatgcttcagggcttcgctgtagcagtgaaaatgggggccaccaaggccgacttcgacaatagggtcgccattcatcctacctcttcagaggagctggtcacacttcgttga

SEQ ID NO: 541 - DNA, 482 bp, Rattus norvegicus (Norway rat)
aaagcggcctgggactggctcattctgctgctggtcatctacacagccgtcttcacaccgtactcggctgccttcctgctgaaggagactgaagatgggtcccaagcccctgactgcggctatgcctgccagcctctggctgtagtggacctcctcgtggacatcatgttcattgtggacatccttatcaatttccgcaccacctacgttaacgccaatgaagaggtggtcagccatcctggccgaatcgctgtgcactactttaagggctggttcctcatcgacatggtggctgccatccccttcgacctgctcatctttggctctggctctgaggagctcatcggactgctgaaaactgccaggctgctgcggctggtgcgagtggctcggaagctggaccgctactcggagtatggggcagcagtgctcttcctgctcatgtgcaccttcgcgctcattgcacattggctcgcatgtat

SEQ ID NO: 542 - DNA, 187 bp, Rattus norvegicus (Norway rat)
  misc_feature (29)..(29): n
  misc_feature (81)..(81): n
  misc_feature (82)..(82): n
  misc_feature (180)..(180): n
aatctgttccctcccacccagcccacttncccccaaccctggaaacagaccaacaacccaaactcaatttccccaaaagcnnaaaattgggagacaattttacatggactttggaaaacatttttttcctttgcattcatctctcaaacttagtttttatctttgaccaactgaacgtgnccaaaaa

SEQ ID NO: 543 - DNA, 797 bp, Rattus norvegicus (Norway rat)
  misc_feature (74)..(74): n
  misc_feature (541)..(541): n
  misc_feature (544)..(544): n
  misc_feature (558)..(558): n
  misc_feature (605)..(605): n
  misc_feature (614)..(614): n
  misc_feature (794)..(794): n
agccctgggccccacaactgcaagcagagccggagccgcccagttacagcgggacccgggcctctggggtccanacaggggtcgccatgatccgattcattctcatccagaaccgggcaggcaagacacgcctggccaagtggtatatgcagttcgatgatgacgagaagcagaagttgatcgaggaagtgcacgccgtggtcaccgtcagggatgccaagcacaccaactttgtggagttccggaacttcaagatcatctaccggcgctacgctggcctctacttctgcatctgcgttgacgtcaacgacaacaatctggcctatcttgaaggcatccacaacttcgtagaagtgttaaatgaatacttccacaatgtctgtgaactggacctggtgttcaacttctacaggttttacacggtggtagatgagattttcttggcaggagagatccgagagaggagccagacgaaggtgctgaagcagctgctgatgctgcagtcgctggagtgagggggggcttccgccccagcccggcntgntgggccaacatgcntgtttgtcccctgccaggtttgaggcccaccccagcagccccttccnttctttagntggcccagaggagtgacccagcagggtttaggccacaggggaggaggccagaacccactgcctttgggccctaagtggatggcagaggccaccgtgatgtcccgagtaactgtgccattattgtgtgatgctgtgagtgtgcgtgtgtgcagcccccaataaacctgtggtcctgcctgnaaa

SEQ ID NO: 544 - DNA, 2129 bp, Rattus norvegicus (Norway rat)
gaggccgctcgagagcaggcttagggtctactgcggccggtggaccctccaacccgcttccataaggctttagctttccaacttcagctacagtgttagctaagtttggaaagaagacataaagaagaccccggtgggcagctttgctgttctttgccttagttgtcctttggggtctttcggcacaaggctgctgtgcttatagccgtgctatctccggttcctcacactcctgtgaagaagccctgggcaagagcagctaaagctactagcatccgaacaaacaaggggagagcgtctggtgccatgaccaagtcaagagatcagacccatcaggaaggatgctgtggatctttagcaaactacctgacctcagcaaaattcctcctctaccttggccactctctctccacttggggggatcggatgtggcactttgcagtgtctgtgtttctggtggaactctacggaaacagcctcctcttgacagctgtctacgggttggtggtggcaggctctgttctggtcctgggagccatcattggtgactgggtggataagaatgccagacttaaagtggcccagacgtccctggtggttcagaatgtatcagtcattctctgcgggatcatcctgatgatggttttcttacacaagaatgagcttctgaacatgtatcatggatgggtccttactgtctgctacatcctgatcatcaccattgcaaacattgcgaatttggccagtactgccactgcaattacaatccaaagggactggattgttgtcgtagcaggagaaaacaggagcagattagcagacatgaatgctaccattagaaggattgaccagctaaccaacatcctggcccccatggctgttggccagattatgacattcggttccccagtcattggctgtggtttcatttctggttggaatttggtgtccatgtgtgtggagtacttcttgctctggaaggtttaccagaagacccctgctctggctgtaaaagctgctctcaaggtagaggagtcagaactgaagcagctgacctcacctaaagatacggagccaaaacctttggagggaactcacctaatgggtgagaaagactctaacatccgtgaacttgaatgtgaacaagaacccacctgtgcctcccagatcgcagaacccttccgcacttttcgagatggatgggtctcctactataaccagcccgtatttttgggctggcatgggcctggctttcctctatatgacagtcctgggcttcgactgtatcgccacagtatatgcttacactcagggactgagtggttccatcctcagtgttttgatgggagcatcagcaataactggaataatgggaactgtggccttcacttggctacgtcgaaaatgtggccttgttcggactggtctgttctcaggactggctcagctttcttgtttgatcttgtgtgtgatctccgtgttcatgcctggaagccccttggacctgtctgtttctccatttgaagatatccgttctaggtttatacatgaggaggcagtgtcctcaactaccaaaatacctgaaacggaaatgcttatgtctaatgtgtctaatgttgtcaataccgtccatgagatgagtactaaatccgtccccataatctccgtcagcctgctgtttgcaggagtcattgctgctagaatcggtctttggtcctttgatttgactgtgacacagttgctgcaagaaaatgtaattgaatcagaaagaggcattatcaatggtgtgcagaactccatgaactaccttctcgaccttctgcatttcatcatggtcatcttggccccaaatcctgaagcttttggcttgctagtattgatttcagtcycctttgtggcaatgggacatcttatgtatttccgttttgcccsgaagactctgggcaaccagatttttgtttgtgctcctgatgaaaaggaagttacagatgaaagtcagcctaatacatctgttgtgtaaaatagtttagctgtggcccctgttactagatttgtggagagcatgtgtgcttattttgtactacagaattccaataaatgcctgcacttttaaaaaaaaaaaaaaaaaa

SEQ ID NO: 545 - DNA, 1627 bp, Rattus norvegicus (Norway rat)
catttctccctcacaaactggagcaaccggcgagcccggggcgggccctgtggcctcggtttggttcgtggagtcccagcggcagattcgctcggcaacgcggacagggccaattctgtcgcgtcaggaatcgcgggtgaagttcgccaccggtggagagaagacgttgagaaaagccgcgctgggctccctcaggggctcgtgcgcactcccagtttcggccttttcatgcaggaaatgaatctgctgccgacgcccgagagtccagtgactcggcaggagaagatggcgaccgtgtgggatgaagctgagcaagatggcattggggaggaggtgctcaagatgtccacagaagagatcgtccagcgcacacggctgctagacagcgagatcaagatcatgaagagtgaagtgctgcgagtcacccacgaactccaagccatgaaagacaaaatcaaagagaacagtgagaaaatcaaagtgaacaacaccctcccatacctagtctccaacgttattgagttgctggatgttgaccccaatgaccaggaggaggatggtgccaatattgacctggactcgcagaggaagggcaagtgtgcagtgatcaaaacttctacccgacaaacgtacttcctgccagtgattgggttggtagatgccgaaaagctgaagccgggagacctggtgggtgtgaacaaagactcctatctgatcctggagaccctgcccaccgaatatgactctcgggtgaaggccatggaggtggacgagcggcccacagagcaatacagtgacattggcggcctggacaagcagatccaggagctggtggaagccattgtcctgcctatgaaccacaaagagaagtttgagaacttgggtatccagcccccaaaaggagtgctgatgtatgggccgcctggtacagggaagactctcctcgcccgagcctgtgctgctcagaccaaggccaccttcttgaagctggcaggccctcagctggtgcagatgtttattggagatggcgccaagctggtccgtgatgcttttgccctggccaaggagaaggcaccatctattatctttatagatgagttggatgccattggcaccaagcgcttcgacagtgaaaaggcaggggaccgagaggtgcagaggaccatgctagagctcctgaaccagatggatggcttccagcccaacacccaagtgaaggtaattgcagccactaacagggtggacatcctggaccctgccctgctccgctcaggacgcctagaccgcaagattgagtttccaatgcccaatgaggaggcccgagccagaattatgcagatccactcacggaagatgaacgtcagtcctgatgtgaactatgaagagctggctcgctgcactgatgacttcaatggggcccagtgcaaggccgtgtgtgtggaggcgggtatgatcgcactgcgcaggggtgccacggagctcactcacgaggactacatggagggcatcctggaggtgcaggccaagaagaaagccaaccttcagtactatgcctagggacacctctagtctgtctgctggggcgggggctcggttgataataaagggggtttttgttcttttccca

SEQ ID NO: 546 - DNA, 1561 bp, Rattus norvegicus (Norway rat)
gcgggccccaccggccgggcggttgggccgtgaagggagagtcttttcggcgctgaggacgggcgctgaggaggcggcggtggctcctggggcgtttgagcgggctcactcgagcccgcgggccgacgcggacgcaggcccagccggcggaaacgccccggactccccgcgggccttcctagccgccatggaggacggtgtctacgagcccccagacttgactccagaggagcgcatggagctggagaacatccgtcggcgaaagcaggagctgctggtggagatccagcgcctccgggaagagctaagtgaagctatgagcgaagtggagggtctggaggccaatgagggcagtaagaccttgcagcggaaccggaagatggcaatgggccggaagaaattcaacatggaccccaaaaaggggatccaattcttggtggagcatgaacttctacagaacacacctgaggaaattgcccgcttcctgtacaagggcgaggggctgaacaagacagccattggggactacctaggggaaagggaagagctgaacctgtctgtgctccatgcttttgtggatctacatgagttcaccgacctcaatctggttcaggccctccggcaattcctgtggagctttcgcctccctggagaggctcagaaaattgaccgaatgatggaggcctttgcccagagatattgcttatgtaatcccggggtcttccagtccacagacacctgctacgtgttgtccttcgctgtgatcatgctgaacaccagccttcacaatcccaatgtcagggacaagccgggcctggagcgctttgtggccatgaaccgaggcatcaatgagggtggggacctgcctgaggaccttctcaggaacctctatgacagcatccgaaacgagcccttcaaaatccctgaggatgatgggaatgatctcacccacaccttcttcaacccagaccgagagggctggctcctaaagctgggagggggccgggtgaagacttggaagcgtcgctggttcatcctcacagacaactgcctctactactttgagtacactacggacaaggagcccagagggatcatccccctagagaacctgagcattcgtgaggtggatgatcctcggaagccgaactgctttgagctttacattcccaacaataagggacagctcatcaaagcctgcaaaacggaggctgatggtcgggtagtagaggggaaccacatggtgtaccgaatctcagcacccacacaggaggagaaagacgagtggatcaagtccatccaggctgctgtaagcgtggaccccttctacgagatgttggcagcaagaaagaagcggatttctgtgaagaagaagcaagaacaaccctgaccctgtccccaactccattatttattttggagctgccccgcctgggtggcaggacccctgggccctggggctgtggatcctggttccctgtttggaaaatcaccacctctagctcctgactccttatttgtaattaacatgttggtaatcttattaattatttaacccctc

SEQ ID NO: 547 - DNA, 1081 bp, Rattus norvegicus (Norway rat)
gcttggaacggtacgcgaagaaaagtgaccatggacaacaacgaaacctccgtggattcaaaatccattaataattttgaaacaaagactatccatggaagcaagtcgatggactctggaatatatctggacagcagttacaaaatggattaccctgaaatgggcttgtgtataataattaataataagaacttccataaaagcactggaatgtcagctcgcaatggtaccgatgtcgatgcagctaacctcagagagacattcatggccctgaaatacgaagtcaggaataaaaatgaccttactcgtgaagaaattatggaattgatggatagtgtttctaaggaagatcacagcaaaaggagcagttttgtgtgtgtgattctaagtcatggagatgaaggagtaatttttggaacgaacggacctgtggacctgaaaaaactaactagtttcttcagaggcgactactgccggagtctgactggaaagccgaaactcttcatcattcaggcctgccgaggtacagagctggactgcggtattgagacagacagtggaactgacgatgatatggcatgccagaagataccagtgggggccgacttcctgtatgcttactctaccgcacccggttactattcctggagaaattcaagggacgggtcatggttcatccagtcactttgcgccatgctgaaactgtacgcgcacaagctggaattcatgcacatcctcactcgtgttaaccggaaggtggccatggaatttgagtccttctccctggacgccactttccacgcaaagaaacagatcccgtgtattgtgtcaatgctcacaaaagaactgtacttttatcactaaaggaatgactgggagtggggtaggggcatgtttctgttttggtttttttttggtttttggtttgttttttttttttttatttgaatgccaaatgagaaaactgtcagggagactttttttttcccctctcatttaaatcaaatccgatgttccaggtcgtcattgaacaataccactgcctgcaatgcagccacaatacaatacctcagctttgata

SEQ ID NO: 548 - DNA, 3622 bp, Rattus norvegicus (Norway rat)
gctgctctgactttcttttagtctcagcatggagaggaccgtcttctaaagcttcttcataaaaacagcagtaagattatttaaagaatagatatctggaaacaatcagaagaacaacatgggaaaatctgagaaaagggttgcaacccatggggtcagatgttttgccaagatcaagatgtttctgttggcattaacatgtgcatatgtatccaaatcattatcaggaacttatatgaattccatgctcacacaaatagagagacaattcggtatccccacatctatagttgggcttatcaatgggagctttgaaataggaaaccttttgttgattatatttgtgagttattttggaacaaaacttcacagacctatcatgattggtgttggatgtgcagttatgggcctggggtgtttcttaatctcgctaccccatttcctcatgggccaatatgaatatgaaacgattttacctacaagcaacgtgtcctcaaacagcttcttctgtgtggaaaacagatcccagaccttaaatccaacacaagacccctcagagtgtgtgaaagaaatgaaatcattaatgtggatatatgtactggtaggaaacataatacgtggaattggtgaaactcccatcatgcccttgggtatttcctacattgaagactttgccaaatctgaaaactctcctttatacattgggattttagaaacaggaatgaccattggccctttgattggacttctgttggcttcttcctgtgcaaacatttatgtagacattgagtctgtgaatacagatgacctgaccataactcccacagatacacgctgggtcggagcttggtggatcggctttttggtctgtgcaggagtgaatatcctgaccagctttccctttttcttttttcccaaaacacttccaaaggaaggattacaggagaatgtggatggaactgaaaatgccaaagagaagaaacacagaaaaaaggccaaggaagaaaaacgaggaatcactaaagatttctttgtgttcatgaagagcctctcctgcaatccaatttacatgcttttcatccttataagtgttctccagttcaatgcatttatcaattcatttaccttcatgcctaagtatctggaacagcaatatggaaaatccactgctgaggtagtcttccttatgggtctttatatgttacctccaatatgcctcggatatttaattggtggtttgattatgaagaagttcaaggttactgtcaagaaagctgcacacttagcattctggctctgcctgtctgagtaccttctgtctttccttagctatgtgatgacctgtgataattttccagtggcaggcttaacaacctcttatgaaggggttcagcaccaactatatgtggagaacaaggtccttgctgactgtaacacaaggtgtaactgctcaacgaacacatgggatccagtgtgtggagacaatggcctggcatacatgtcagcctgccttgcaggctgtgagaagtctgttggaacaggaaccaacatggtgtttcagaattgcagctgcattcagtcatcgggaaactcatctgcagtcctgggcctgtgtaacaaaggccctgactgtgccaacaagctgcagtacttcttaatcatagcaatatttggctgtttcatatactcgctggcaggcattccagggtatatggttcttctgaggtgtatcaagtctgaagagaagtcacttggagttgggttacatgcattttgcataagaatattagctggcattcctgcacccatttactttggagctttgatagacagaacctgtttacattggggaaccctgaaatgtggtgagcccggggcatgcaggatgtatgacataaacagcttcagacgtctttaccttggattgccggctgcactaagaggagcaagctttgtccccgccttcttcattctaagacttacgaggacattccagttccctggggacattgagtcttcaaaaactgatcatgcggagatgaagctcaccttgaaggaaagtgagtgcacagaagtcctaaggtcgaaagtgacggaggactgaaaacgaagctgtaatgagttttctactgccctatgcaaggccatgaagagaatgtacacttcactagttttgaatcatgagagatacaattggaactcttaggttatccataaggccgtcaaagttacttcattcatgataaaattatttactgatagcattttcagaaggctgacatagtactcaagattttcccagggaaaacttctatagtggccttcacccttaaccttaaagctgccttcattttcaaccagcatgttctcttttaactcaatcaagggaagtggatgtttcccacacattctcaaatatctttgaaactttcctattgcagaaatatcatttagatgtttttaatttatatactgatgctggagatcaaaatatacatcttggttaagccagattgcgttagtttgttttgatttatcctctgcatgtgcaaaacttctgcatctgtcttgtgtacttaggagtggtaactctcttttacttctaagattagactcttcagagtgtgccatctcctgttttcagtcccttctatcattacttctgtcacacagttgatcatttcacatacatcactgaaaactttaatcaggttgttaaccagtcatgtagcaaagatgattgggactctttttctctaacaattcaaagctggtcatgaaactcttttttaaaaatcaagagtaggggaaaactagtcctttcaaaggctccttgtagagatgggctgtatctcagtggaatagttattacctaatgtatgtgaggccccaggttcaaccacaacgtagggtaaaccaataaagtaataaaaataacgtaagtccagatgcatcatcagatattctaaaaggctattctcatattcagggggcttcaatggcttagtgttcattctattcaagggccatggagcacatagttattaacattcataataaacttagagtaaaacctttaaagagggaccagatagaaagttcgatagaaagaactgtttgccaccgaacctgaaaaggttgttgtgatccttgggaccaacgtgaaggagagaacaaactctcacaagttgtgctatatctctttttaattgtgcatgccccattgcaaatcaattaataaaaaaagcattaaaaggtttaagaccgacatttgctgtaaaattatagctcataaacgtgaaagtacacatcaaaaataaaatcaagttgtggttgttttaatgagaaatatccctcctaggcataggcatttggatatttggtttctaatgaatgactctgcttagggaagattggatgtgcatccctaagacaaaaggtgaatcactgagatgggttgaaagttaaaagcctcacctacttccagtacactctctgctttgtgctttggttgatgatatgaaatcatggtttcctgctccagccaccatgcctggtgcttgccttcatgaacttccatccctggagtcatgcgttaaaataaactcctttttttaatgtg

SEQ ID NO: 549 - DNA, 1686 bp, Rattus norvegicus (Norway rat)
cctaagttgcttgtctgggccactggcaaattcttccttcccaggctagacacacaggctgagcaattggttccgaacccagaggaacccaggcgacgctaggtcacgtggccgactgcttacatgacctgcgggctgctgagcgtcactgtgacgttcaggagacctgcgaagtggcccggctacttccgtcacctgtgctgtcggggtgctgtcatggacctgggaccgatgcgcaagagttaccgcggggaccgagaggcatttgaggaggctcatctgacctctctggatcccatgaagcagtttgcttcctggttcgaggaggctgttcaatgtccagatataggagaagccaatgctatgtgtctggctacctgcaccagagacggaaaaccctctgcccgcatgctgctgctgaagggctttggcaaggatggcttccgcttcttcactaactacgagagtcggaaggggaaagagctggactctaacccctttgcctctcttgtcttctattgggagcccctgaaccgtcaggtgcgtgtggaaggcccagtgaagaaactgccggagaaggaggctgagaactacttccattcccggcccaagagcagccagattggggctgtggtcagtcgccagagttctgtgatccccgatcgggagtacctgagaaagaaaaatgaggaactggggcagctctaccgggaacaagaggtgcccaagccagagtactggggtggctacatcctatatccccaagtgatggagttctggcaaggccaaaccaaccgcctgcatgaccgtattgtcttccgtcgaggcctggcaacaggagactcccctctgggacccatgacccaccacggggaggaagactgggtgtatgagagacttgcaccttgacactggactccagaatgttgggggatcatcatagggaagagtgggggaagggaaggaaaaaaatggaagccaggtataccttctgtgtgtgtgtgtgtatgtgagacattgggtttaaacctcgctcacactaggtaacactttaccactgagataaagtcccagcattttttcttactaccttttattttaagactaagttgcttagtctggccctgaactcactgtgtatacatcccagacaagtcttggctttgagttcctcccctcagtcccttgagtagcagtattataggcttgtgccaccaggcccagttctagtcctgtttttaagaagcccattgcctttgttttttttttttttttttttcttcggggctggggactgaacccaggaccttcggcttcctaggcaagcgctctaccactgagccaaatccccaacccgcccattgcctttgcctttgttaacccttctacctgcatttctccaggactcaccctcaagttctctgaactcgggatcggtttagtggctggaacagagcgcagtagtgttgtagagagtcacaagtagcaaagagtctcataattattcccttgattttgctcctggtttggggggacgcccgtcttgggagctgcagctggtctaactctgtttccagtaacagactaatcaggccgcagatatacaagggctcgctggctatggaaaggagccagaccatgtttgctgtgactcagacaaaccattatatgttctggttggccttg

SEQ ID NO: 550 - DNA, 1047 bp, Rattus norvegicus (Norway rat)
tttgggcaggacaaggcaagagaagcggctgtttcagtagtgtttgtacccagaactcagcgaggtctacccttgggtagagcgaacgtccggccatggcttaccactcgggatatggagtccacggttccaagcataggacccgggcagctccaaaccctcctccactcttcgatgatacaagtggtggttattccagccaactaggcggatacccagccccaggagctgatgtagccttcaatgtcaacaacctgcttggagacccagtggccaatatggctatggcccatggcagctccatagcatcccaagggaaggacatagtgcacaaagagctacaccgttttgtgtctataaacaaactcaagtatttttttgctgtggacacagcctatgtagccaagaagctagggctattggtcttcccttacacacatcagaactggaaagtgcagtacagtcatgatgtgcctcttgcccccacggaaagacctcaatgcgcctgacctctatatccccaccatggccttcataacatacgtgctgctggctgggatggcactaggcattcagaaaaggttctccccacagcatgtggggctttgtgagcgagacaggtactggtgtgggtgttaatggagtgttggctctgcttctggcctctacctggccaccgtacgcagtgaactgggcaccttccacctcttggcctagactggctacaagtatgtagggatgatcctcagtgtgctcacagggctagcttttcggcagtgatggctactacgtggccctggcctggacatcgtctgcactcatgtacttcactgtagatctttgcggactgcagcttgggtcctgacagcatggggggcccacccctcggcagcatctccagctgtacctgaccctgggagccgctgcctccaaccccttatgatatactggctgaccttccacctggtccggtgacccctggtcctttggtggcactgagttttccatacattgaagatttggtttccttaaaaaaaaaaaaaaaaa

SEQ ID NO: 551 - DNA, 1574 bp, Rattus norvegicus (Norway rat)
acaacttcaaagcaaatgaagttcgttctgctgctttccctcattgggttctgctgggctcaatatgacccacacactgcggatgggaggactgctattgtccacctgttcgagtggcgctgggctgatattgccaaggaatgtgagcggtacttagcacctaagggatttggaggggtgcaggtctctccacccaatgaaaatattataattaataatccatcaaggccttggtgggaaagatatcaaccaatcagctacaaaatttgctcaaggtctggaaatgaaaatgaattcaaagacatggtgacgaggtgcaacaatgttggtgtccggatttatgtggatgctgtcattaatcacatgtgtggctcgggcaatagtgcaggaacacacagtacctgtggaagttacttcaatcctaataacagggaattctcagcagttccatactctgcttggtattttaacgataataaatgtaatggagaaattaataactacaatgatgccaatcaggtcagaaattgtcgtctgtctggccttctggatcttgcactcgataaagattatgttcgaaccaaggtggctgactatatgaacaatctcattgacattggtgtagcagggttcagacttgatgctgctaagcacatgtggcctggagacataaaggcagttttggacaaactacataatctaaatacaaaatggttctcccaaggaagcagacctttcattttccaagaggtcattgatcttggtggtgaagcaattaaaggtagtgagtactttggaaatggccgcgtgacagaattcaagtatggtgcaaaacttggcacagttattcgcaaatggaatggagagaagatgtcttacttaaagaactggggagaaggttggggttttgtgcctactgacagagcccttgtgtttgtggacaaccatgacaatcagcgaggacatggtgctggaggagcatccatcctgacattctgggatgctagaatgtataaaatggcagttggatttatgttggctcatccttatggattcaccagagtaatgtcaagttaccgaaggacaagaaatttccagaatggaaaagatgtgaatgactggattggaccacctaataacaatggagtaacaaaagaagtgaccattaatccagacactacttgtggcaatgactgggtctgtgaacatcgatggcgtcaaatcaggaacatggttgccttcaggaatgtagtcaacggtcagccttttgcaaactggtgggataatggcagcaaccaagtggcttttagcagaggaaacagaggattcattgtctttaacaatgatgactgggctttgtcaagcactctacagactggtcttcctgctggcacatactgtgatgtcatttcaggagataaagtcaatggcaattgcactggacttaaagtaaatgttggcagtgatggcaaagctcacttctctattagtaactctgctgaagacccattcattgcaatccatgccgactcaaagttgtaagagtcaaattaaagagatttagattcagcacc

SEQ ID NO: 552 - DNA, 773 bp, Rattus norvegicus (Norway rat)
tcttgtgggagctgctgttgcttttcccgtggatgatgatgacaagatcgttggaggatacacctgccaagagaattctgttccctaccaagtgtccctgaactctggctaccacttctgtggaggttccctcatcaatgaccagtgggtggtgtctgcagctcactgctataagtcccgcatccaagtgagactgggagagcacaacatcaatgtccttgagggcaatgagcagtttgtcaatgctgccaagatcatcaagcatcccaacttcgataggaagaccctgaacaatgacatcatgctgatcaagctctcttcccctgtgaaactcaatgctcgagtggccactgtggctcttcccagctcctgtgcacctgcaggcactcagtgcctcatctctggctggggcaacacgctcagcagtggcgtcaatgaaccagacctgctccagtgcctggatgccccactgctgccccaagctgactgtgaagcctcctaccctggaaagatcactgacaacatggtctgtgttggcttcctagagggaggcaaggattcctgccagggtgactctggtggccctgtggtctgtaatggagagctgcagggcattgtctcctggggctatggctgtgccctgccagataaccctggtgtgtacaccaaggtctgcaactatgtggactggattcaggacacaattgctgccaactagagctctccaatccctctacagtcattatgtcaataaagtgaaatattctttactg

SEQ ID NO: 553 - DNA, 1725 bp, Rattus norvegicus (Norway rat)
agtgctgctccggtaccgagtcgcgctcacgtttgtccttaagactcccttcggtgtctccaggaccctctttccttcctccgcagcgatcctactgccagaacttcaccatgtccattctcaagatccatgccagagagatctttgactcccgcgggaatcccaccgttgaggtggatctctacaccgcaaaaggtctcttccgtgctgcggtgcccagcggtgcgtccactggcatctacgaggccctagaactccgagacaatgataagacccgcttcatggggaagggtgtctcaaaggctgttgagcacatcaataaaactattgcacctgctctggttagcaagaaactgaatgttgtggagcaggagaagattgaccagctgatgatcgagatggacggcacagagaataaatctaagtttggtgcaaatgccatcctgggagtgtccctggctgtctgcaaggctggtgccgtggggaagggggtgcccctttaccgtcacattgccgacttggccggcaaccctgaagtcactctgccggtcccagctttcaatgtgatcaacggcggttctcatgctggcaacaagttggccatgcaagagttcatgatcctgcctgtgggggcatcctctttccgggaagccatgcgcattggagcagaggtttaccacaacctgaagaacgtcatcaaagagaagtacgggaaagacgccaccaatgtgggtgatgagggtggattcgcacctaacatcctggagaacaaagaagcactggagctgctcaagtctgccattgcaaaggccggctacactgaccaggttgtcatcggcatggatgtggctgcctccgagttctacagggctggcaagtatgacctggacttcaagtctccagatgatgccagccggtacatcacacccgaccagctggccgacctgtacaagtccttcatcaaggactacccagtggtgtccattgaagatccctttgaccaggacgactgggatgcttggcagaagttcacagctactgcaggcatccaggtggtgggggatgacctcacagtgaccaaccctaagcggatcgccaaggctgcaggcgaaaagtcctgcaactgcctcctgctcaaagtgaaccagattggctctgtgaccgagtctctgcaggcgtgtaagctggcccagtccaatggctggggtgtcatggtgtcccatcgatctgaggagactgaggacactttcattgccgacctggtggtggggctctgcactgggcagatcaagactggtgccccctgccgatctgagcgcctggccaagtacaatcagatccttagaatcgaggaggaactgggcagcaaagccaagtttgccggcaggtccttcaggaaccccctggccaagtaaggcatggaccggagatccctggagctaccagatcctctgtctccgtcatccaggcggctcaaggctggcccagtgcttgcccctcccatgtcactgcttccttagatgtccaccccgaccacctggagccctgctggagcccccagctttgtaatcatgtgatcagtctgaatcattgtttctgtcacctgactttccagctagtgtctggagccctctgaactccagcgtaatctctagagtgcccacaccatcaagactccccccagtggtttacttgcaaaaataaaagctgcagaagctcaaaaaa

SEQ ID NO: 554 - DNA, 2362 bp, Rattus norvegicus (Norway rat)
atcatcagaggacttggtggaggagagcttataggtttggctgctgggaggctgctttgcctggacttggaagattttcctgtaggcttcgagaggcatggactcctacgtgattcagacggatgtcgacgacagcttgtcctcagttctggatgtgcatgtcaatattggtgggagaaactcggtacaaggaagaaagaaaggcaggaaggccagatgggacgtgagaccctctgacatgtccaataagaccttcaatcccatccgagccatcgtggacaacatgaaggtgcagcccaatccgaacaagaccgtgatttctctgtcaattggggaccctactgtgtttgggaacctgcctacagaccctgaagttacccaagccatgaaagatgccctggactcggggaagtacaatggctatgccccgtccatcggctacctatccagtcgggaggaggtcgcttcttactaccactgtcatgaggctcctctggaagctaaggatgtcattctgacaagcggctgcagtcaggccattgagctatgtctagctgtgttggccaatcctggacaaaacatcctcattccaaggcccgggttttccctctataggactttggctgagtctatgggaattgaggtcaagctctacaatctcctgcctgagaagtcttgggaaattgacctaaaacaactggaatctctgatcgatgaaaaaacagcgtgtcttgttgtcaacaacccatccaatccctgtggctccgtgttcagtaagcgacaccttcagaagattttggcagtggctgaaaggcagtgtgtccccatcttagctgacgagatctatggtgacatggtgttttcagattgcaaatacgaaccactggccaacctcagcaccaatgttcccatcctgtcctgtggtgggctggccaagcgctggctggttcctggctggaggttgggctggatcctcattcatgatcgaagagacatttttggcaatgagattcgagacgggctggtgaaactgagtcagcggatcctgggaccatgcaccatagtccagggtgctctgaagagcatccttcagcgaacccctcaggagttctatcacgacacgttaagcttcctcaagtccaatgcggacctctgctatggggcactggctgccatccctggactccagccggtccgcccttctggagccatgtaccttatggtgggaattgagatggagcatttcccggaattcgagaacgacgtggagttcacagagcggttgattgcggagcaggctgtccactgtctcccagcaacgtgcttcgagtacccaaatttcttccgagtggtcatcacagtccccgaggtgatgatgctggaggcttgtagccggatccaggagttctgtgaacagcactaccactgtgctgaaggcagccaggaggagtgtgacaaataagccctcacccgtcctcctgaagacatgtcccacgcaaggacggttggactggaccgctcctcctcagggagccaaatgtctctgatgggagaggaacctctaaagcaccgcatgaagacttgaagatcatttctccttcccccagtttcacccaacgcacgcctggaaacccagacccctccctactcagttctgctggagccatgagctcactgccccccaccccccacttccttatcctgagggtatcagaccaatttaccagaaagaagctgggccaagaaaagagagagctcaggatgagagaagcagaagacggaggatgcctctcccacccatttcctcgtgctgacatcctcttcagtcaggtcggaagtcacctcagttgctgcctcacttcaggcaaacctcactcctcgtggtacagctacaccagagagaagtcgaggacttgtgaattcagttaattgtattctaaacacatcaggaaacttgatgtttaaaggatccctgacagaatttttatttttattttttgtaaaggattattttgcggtgcaaataaataccagcttcctaaactgatcaacttcctaactgattagatagatctacttgtatcaggttttcctaaaataggaggacacctcactgaaggagaaagaagggaccggaggcctctctagagactttgctgtgtacaggacagcatcttcctccttgtcttctcgtagaatcatatatagccacttttgctatcatgtgaatattgatttattgatatttgtaatattaacttttcatatattttcctaagaaacatttatattataaggccttttattttgtcaagggcataaattattttttctttatttttgaaataaaaatttatcaaat

SEQ ID NO: 555 - DNA, 1242 bp, Rattus norvegicus (Norway rat)
aacatggcccacctctgcatcgtgggctgccacgcggtgaacggggtagcgaagatccactcggacatcgtgaagacccaagtattcaaggacttcagtgagctagaaccagacaagttccagaataaaaccaacgggatcaccccgaggcgctggctcttactctgcaacccagggctggctgacttgatagcagagaaaattggagaagactatgtgaaagacctgagccagctgacgaagctccacagcttcgtgggcgacgacatcttcctccgggaaatagccaaagtgaagcaggaaaataaactgaaattctcccagttcctggaaaaggagtacaaggtgaagatcaacccatcttccatgtttgacgtgcacgtgaagcggatccacgagtacaaacgacagcttctgaactgcctgcatgtcatcaccatgtacaatcgcatcaagaaagaccctaagaagttcttcgtgccaaggacagtcataattggtgggaaagctgccccaggatatcacatggccaaaatgatcataaagctggtcacctccgtggcagaagtggtgaacaacgaccctatggttggcagcaagttgaaagtcatcttcttggagaactacagagtgtctcttgctgaaaaagtcattccagccacggacctgtcagaacaagtctccactgctggcacggaagcctcggggacgggcaacatgaagttcatgctgaacggggccctgaccatcgggactatggatggggccaatgtggagatggcggaggaggccggggaggaaaacctgttcatctttggcatgagggtagatgatgtggccgctctggacaagaaagggtatgaggccaaagaatattatgaggcccttccagaactgaagctggtcattgaccaaattgacaatggcttcttttctcccaatcagccagacctcttcaaagacatcatcaacatgttattttatcatgacagatttaaagtctttgcagactacgaagcctatgtcaagtgtcaagaaaaagtcagtcagctgtatatgaatcaaaaagcctggaacacaatggttctcagaaacatagctgcctcggggaagttctccagtgaccgaacaatcagggagtatgccaaggacatctggaacatggagccttccgatctgaagatctccctatctaaggagtccagcaatggggtcaacgccaatgggaagtaaatgctaaaa

SEQ ID NO: 556 - DNA, 25759 bp, Rattus norvegicus (Norway rat)
  misc_feature (7)..(7): n
  misc_feature (8)..(8): n
  misc_feature (9)..(9): n
  misc_feature (10)..(10): n
aagcttnnnnaacaatgtggcactgggcaagaaactcagagccaggggccatactcttctcaggtgatggatgaacacttcaagactcatggtgctaggagcaagatggacatttcagtctaagctagagcaagaggagcaatgagaagtcttggcttcactgtggtatgatggctagccaagcacaggcggcggcgagctcagcacgctctccagatagtcatttcctttgcctggcctctctgatatgaaattgcctaaatcttgggaagggatctctgaaggccctatgtctcatcaccataacatggccttacgctggggaaagactgtcttccaattccaccatagctccttgaagtgtcctagacaggagagaacatacagaggatgtttaataacggtccctatgaagacttcagtcctgctttccccttctacccttccagtgtatgggaaggctgtgaggggatggtccttattatcaagtgggatacatcggcatgcagttctctagtaaatgaacaaccaaggtcccacacaactcagaccctcgccccaaagattgggccaagaaaaacagagggatgggaatggacaattttcaactataccttgactctcttattaaggcttaattttccagtcccaatttagaaatgacagcatctgttaggtgatacccgccccccctttctcttcagtcccctaccgtcccctcacctcccatctaggctggcagctgtcactgtgaacacgggctggtggcatagctccctgtcattaacttgcttgttggtcctgctagagcttaagaaaggattaagtaaataatgatagtaatgagacagagagcaatgggagaaagggaagagatagggaaggagaaaaaaaaaccctaaattcaacagcccaagttttacagtcaaactgccccgccacaaccttggggtgtgctgagtctgtctcataatcccaagggatttcgacaggtccaatcccattttattcatttttctcatcagtgagctttctaagcaaatagcacaatggtgtgtcccctgttcccaagtggagcagcttcttcgtatgatttcagggtgggatggcctgcaggatggagacaggcagggccctgaagcaaagacaagcccattgctctaggtgaagaagcaacagccctgagtccagagcaaggcatctcaaattccctgctttctacagttggaaaaatggtttcggaccctgctcatttctatatatactttccccttggcaacgatgaaaaatacgtgtggagggggccagttctcagcctgtggtgtcagtcattctctttccaaatttagagaaagaatgagcccagggggttagtggttagcctataaaagcccagggggcggctctcctctgtgcttcactctgccacagtcagaggtaagtaaactctcttcatatctctttggcctttgctgcttccctgcctggttgggtcactgccctgggctgtggccctccctggctttgttatagcaggtgaggctcatttatcttttcaaggcgtcctcaaagaatacagtggagtgagatgtgagctgtgcctgccacccactgcctctagcaggtcatcgaagctggggtcctgcaccctctttctttcctctgtttgggaaggatcctgttggacatgcataaggccatgatgccatgttctcctgttgcctctctgatccacagagtgaacaggggactctgcactccctacctggactctatacccattgagtgttcagttgcctcaagactgcatacttgctcaccaggtttaaattccataatctcagcattgtctccactttcagataaccaggaggcctgaccccaactgctaacacaagcttttactggcaggactccgtccatttagaatccctgccctgttcacaatagaggatcttggagtctgaagaaactgtctggagtgggttagaggagccaatctgtcaggcagctggtagctatgcctagctgtagaccacgacttgtctgcagttatagggctggtctcagggctaaggctctttctgtccagtcctttctgtgtctgaattgagcctcaccaaggtctggttcatcatagaagcagacaacatggtgatcactaagcttctctgtgcccatgctcttgcaggtcccataggtccacagctgctgctgctgctctctgctgtcctgccggtgtgactcaggtgagaattggggccacatcccagggcttcaagaagtcttcaggtaaacccagatcacccattgccccctcacgcctgtgccctgaggagttacagatcttagatacagaagaataggcttcctccccagggctgcagctagaagttcccatttattctttgtggtggtttgctggttttttgagacaggatctcactatgtagccctggatggcatggcatagaactcactaagtagaccaggctgcctctgcttctgaagtgctgagatttaaaggaatagaccaccgtgcctgggaggaagaggccatgtcaattaaaaagcagttcaaactgcctctgccattttctgctcagcatcctctctttgaggaatgcctttacttatttttattatggtatttaacttgggatgttctgttctccatacctgtacttctcagaaaaggaagacaaagtgtcaaaagtggcatttcaaaggctccttcaccagactgaaagaatcaagagacacttggattaaacagattctaagcccatggcatacagtagcaactcaacaaacacgagtggattatgttttcccagtgctgagccctcgtgtgaagctccactgggcatgggacaggccagatctccttgaccttgtctgagaggctgccatccacttcagggtgacaggttgatactaggatgggcaggaggctgccggctgccggctgccggcccagggagcagctgggctgactggcagtttgttttgcagccaacactatgagtagcgacaccgagatggaagtgtttggcatagctgcccctttcctccgaaagtcggaaaaggagaggatcgaagctcagaaccagccctttgatgccaaaacctattgctttgtggttgactcaaaggaagaatatgccaaggggaaaattaagagtagccaggatgggaaagtcacggtggagacagaagacaacagggtaaggcatttgctttttctctttctcagcactggcccacgctcctcacatgacgttgcataagcatgtactcctccacccacttctggagtcagagcctggctctggaattcagcatccgaaacagcgctggcaacccagccgccagaagaaagccgaatgccctagcctatgtgggagaatgggagacgggtccccaggtggctgattaaagcatttacttttgggtgtctttttatcactgccttgttctgggccagacaccaatctcaatgtctcaagggtggagtgtttttagaacacccaccctttgtggttcgcctagctctgtccatggtcatccaaccaaggaaggcggggtgatgtataagaaatgctataggacaacaaggtcaaagaaccaggctctctggaactggaatgggacgggcaactgagttcactgtgttctgtgggaggaagggaggaatttgggggctttcgaaaatcccgaatctggaaatgtttcaaggaagaaaacaaaagcaactgtgggtatggctcagtgatagaacggcatacgcaaagtcctgctttcaatcgtcacattcagtcaccacctgtgtcagggtgggtgtaacggaggtagaagcagagacagaacagaagatgcaagagacaaaatggcggcattcgttggagcagggaggaaatgggcagcaccagcgtggaagctcccagaacgaaggcatcgctacatatctaagattaaaaatctgagaaagggcttccaccgcaggacagaaggcaggggctaaactcaacgtaggatcctcacagggtctagaacatgcctgagaggtgtcaagagagtccacagcctaagtggattaagggagggaaggaaggcagctctgtggcccacagtgctcaaggaccggcttttccagagtcactcctaaagagagaggagggcagggactgataaccccacctgcaggtccttaggccctccacagaggacagccccagggcttggtggtgaaagtcttgctctcaaagcggaggccaatggctcttccccaagagcagggaaattggtaaaggaagtaggatggggtttggttttcagcaatggagggctgaattacatagatgggggcgtggttctcagcgctgattggctgcttctacagggcagtgacgttagcaggctctgtgggcactcccagggctacagtgccttctctaattccctgttgtcgttggtcaagattactgcagacattatcttttctcttagcaggtaggagagctatagggcaaccgaagtcatagacaaataacttcctctgactccaaattctgtgttacaggcccctacttagtcctcagaaatcttctttcatcacattggttgccatcccccaactccaggtccaagagaaacacacacacacacacacacacacacacacacacacgcacgcacgcacgcacgcacgcacgcacgcacgcacatgccagagaatgggagagacagagagacagagagacagagagtgagacagagggacaaagagacacagagacacaaagggagacagagagaaagacacacagaaagagacagagacagagagacagacgtcctgagtggacttcattttagaaatcgtttctttatgagttatcaaaagaagtatgggataatagtaaaggtgaaacatatatattacatatataatacatgtatatgtgtatctacatatatgtatgtattctgcatgtattttttctcccatagacctatgtgggagcagaccacatgctttcccactgccacatacctcgcttttcctcactgtcaccaggcatttcctctgctccctgcagtctctcctaaggtgccagacatccacggcaatccaatggctggggaacattaatgacttttcccttccagaccctggtggttaaaccagaggacgtgtatgccatgaaccctcccaagtttgacaagatcgaggacatggccatgctgacccacctgaacgagcctgctgtgctgtacaacctcaaggaccgatacacgtcctggatgatctacgtgagtggctactcaccaacaggctatgctgggacattagctgggtgctggggagtggggagaggcactttgaaagattctcgtttgcctggccaaaggagaggaaatgaagtagagaagtgaatgaccagacaaggagagatagatgggatgggaaggggaggggctggaggaagggagggagggaggaggaaggcgaaggaggagctaagattgggaggaggagctccaaagagcaaaaaagctgaggttaccttgagcttggtattagctgtgggaggactggctactctcccccttgagtttcagttacttcattcatcactagaaatcacgatttctttatgaattatcaaaagaagcctggagtgttagtaaaggcaatatatatacatatgtatatatgtatatatatgcagtacatgtgtatatgtatatatgtatatacatatgtatgtatgtatgtatgtatgtacatatgtaagtacggatgtattttcttttcctcccatagacctattcaggcctcttctgtgtcaccgtcaacccctacaagtggttgccggtgtacacccctgaggtggtggatggctaccgaggcaaaaagcgccaggaggccccgccccacatcttctccatctctgacaacgcctaccagttcatgctgacgggtgtgttttcgagaaggaagtatgcactagacaggcttgggggcactctggtgtgaagccctagagaaggaggggcaaggaggaaaagaggttttaggtccttggggtgaggagtttgcatttaacataagtattggtgagaccataggaaagagtatccctaccaatcagaagactgtgagatcagaggatcgagaagcctcatggttctcaggacagacactttttaaatccccacctgtgactaagcagacaaacaaacaagtaaataaataaagggaagaggaaaggaacagttgaaacccactcttgcatgacgaataagaacctctttggacatagccatcagctctgctttcttcccctcacacagatcgtgagaaccagtccatcctgatcacgtgagtatccctgcttagagaggcctctcagctgggccatggatgtatccctcagctctattcattagacagtgcttggagcacagcccatggtgaaaagacagcttggggtgattcaaacaagcctcagaaaacgagtagtacccatgcttggatcaactaaggctgtagcccaggtcctctctgtggcgactcatttgatgtgtgtgccagacgtgttgaagaccactggatgacatgccagggtgctggtttatgagtaggaccgacttctctgtctccgtctttctaaatagcggagaatccggggccgggaagacggtgaacaccaagcgtgtcatccagtactttgcaacaattgcagccactggggaccttgccaagaagaaggactccaaaatgaaggtggggacgggagcaaggaaagaggctggacgggcataagggacagcttggggttgaccgtggattcagacccctgtgattccttagcagatgagatttgaagactttataaggggggggggatatggagtcaaatccgtgagtttgttccttcaggtggcctcacagagagcagcccaagagcacagtgaggaacacatatcccctgactcggtgtactgcaagggcgtgggaggaacacaggcagcctcattaactgaagggtcaaacgaaggcatggccactcaagagatccagctgctgacagggacttgagagaggcagcagtgtttcaaggaggccatgctgctccattggcctttgagtcatcaagtcaccggggcagcgagcaagctaggcaggcaggaaaagcagagcaggtggcaatttcttaaaaatgaggatttttgcagcttacaggcacattttcccttcctctttggatttcttacttaggggaccctggaagatcaaatcatcagcgccaaccccctgctggaggcctttgggaatgccaagaccgtgaggaatgacaactcttcccgctttgtgagtctgcccttgagtatgataggctcttcttcccggcctgctggacagttcaagagcttagggaacttacaggcccggtggaaagagacagtgaaagaaacaatgcacagccatgtgtgtgaggttcaaaaacccaaggctgtaactgagaaactggggaccaggtccccaacagatagggctagatgataagggctttctaggcgctgggaatatgagtcgaagctgcagggtaaggaagggaatgagggaaagagtggcttggttctcccagggtgggaccgtgtttggagcactcctgcagaggctccatgtgacagatggggaagcagaagatggagagacttgtcactaacaagggatgcactgtcccttgttattagctgtcttcagacacacttcagaagaggtcatcagaccccattacagatggttgtgagccaccatgtggttgttgggaattgaactcaggacctctggaagagcagccagtgctcttaacctctgagccatctctccagcccttgggttttgtcttaagtgcagtaggaaggattctgtaatcagggaagtgacatggttcagcacctgggttatttcattaatgggatatgagaaatcccggaggaggcagacacaccagataggagaagaggggacaggagggaagacctactggtgaaaggctcctatgggcagtgctcaggaatccagaggaagttcctcagtcatggaaggatctgctctccctctctctctatgcagggcaagttcatccgcatccatttcggcaccactgggaagctggcctctgcagatattgaaacttgtaagtaggctcgttgagctgggtgaagcctccaagccacggggagcattgtgaaccctgaccggccctgtgtttctgttccagatctgctggaaaagtccagagtcaccttccagctgaaggctgagagaagctatcacatcttctaccagattctttccaacaagaagccggaactgatcggtaagctgatggggtagggtgcaggtggaggggatgacgtcaccctttgggcagttggatcattagagcccggagagttggtcgtacctgcagatgactcttacagtcaatgcagaattatatcagccacaggatatagctctttgggaggcggctgtatcaggttttggaagtgtatatgttgtctgctggtgtatgtatgagaatgacactcggtgtcttccctgatttctctaaaccttgttgtattaaggcaagggctctcactaagcctggagctactgtagcttgacagaatgctgctaggatccacgtctctgccttctgaggattacaagcagacgcccccccccccccccgacttttatatgagtttaggggattcaaactctagtccttatagctttcacggcaagctctttacctgctgagccatctcccaggctcactgtaccaatttgaaaatctgaccagatgtgctgtaatggagcaaaatcattactggttccatggtggtctttgaatagttaagcacttaatggttcttgagcgccctcttgtgtttcaacataggaattgatctcagctcgcataaggccggtgcaaactgattaaggacccagagggtcattctatctctatattttttcagctgatagaggcctgtgtgttcactaccttccttactttctgtctgtgatagctaagcctcctgatctccatcctgcaaacaggctgtcagttttcaaccaactttaaaacagctatcccaatcagcctatggtttctccagcttgggctcccattacccagttttacttgttcactatcccaaacatacactggcttgcaacattcatttgcaaagcaataccacggatatgttttcctaggatcctcaacttacatggcatgggagattgccctttcccttagaccagtagtagttctcaacctaggaaggttgaaatgctagaacccttcaatacaattcctcacattggggtgatcccaaccataaaattatttctgttactacttcataactatcatcttgcaatgcttaaaaaatatctgtgaaacacacatggtatgcactcattgataagtggatattagcccaaatgtttgaattaccctaaatgcacagaacacatgaaactcaagaaggatgaccaaaatgcgaatgcttcactccttctttaaaaggggaacaggaatacctttgggagggaatagggaggcaaagtttagaacagaggcagaaggaacgcccattcagagcctgcccacatgtggcccatacatatacagccaccatactagataagatggatgaagcaaagaagtgaaggccgacaggaaccggatgtagatctctcctgagagacacagccagaatacagcaaatacataggtgaatgccagcagcaaaccactgaactgagatcaggacccccgttgaaggaatcagagaaagaactgagagagcttgaaggggcttgagacctcatatgaacaacaatgccaagcaaccagagcttccagggactaagccactacctaaggactatacatggactgaccctgggctccaactgcatagatagcaatgaatagcctagtaagagcaccagtggaaggggaagcccttggtcctgccaagacaaaaccccagtgaataggattgttggagggggcggtaatggggggaggatagggaggggaacacccataaagaaggggatggggaggggttagggggatgttaggcctggaaactgggaaagggaataacaattgaaatgtaaataagaaatacccaatttaataaaggtggaggaaaaaaaaaagaaaatatctgtgtttttccaatggtcttagatgaccctgaagaaaaagccttttaacccaaaaggggtcacgagccacaggttgagaaccactgctctagggtattctactcctgcacattttggccccagtggttgaagtcccaggccacacttccacctggtggagatctcattacacatgtgtgaattcctcatttcagagttgctgctgattacgaccaacccttacgactacccattcatcagccagggtgaaatcctggtggccagcatcgatgatcgtgaggaactgttggctacagacgtaagaaggacttacggtagagaggtgggagaacctccacgtagggagggcaatgaatgggcagacatgctgttctttccactgcagagtgccattgacatcctgggcttcaccccggaggagaaatctggactctataaactgacaggggctgtgatgcattatgggaacatgaagttcaagcagaagcagcgagaggagcaagctgagccagatggcaccgaaggtacagagtcaccacagcaggcttcagagtggaagcggagaggtcaactcccctggggccatccagaacctgttttaaaaatgattaatctgtctttcctctggagaggtggatgaacctttcctgggtctgcaatgaacataaggaaacatcaccatctattaaaaaacacttattagtttagtgtgtatgtgtgtgtgtgtgtgtgtgtgtgtgtgtgtgtgtgtgtgtgtgtgtgtgtaaggattctacacctcatgtgttgaagtcagagtacaactttaagagtcagttctctccacaatgcaagtctttgggaccaaaccccgttgccgggtatggtaccccatgcctctacctgtttagccatctctctggtccctctaccccccttctgctgaattgctacaaaggtcttcttctggatgcaatgtgaaatggccagggacttccaaacccaatcctgttgctccatgaagtctgccacactctctggatggtgtagtgccatgggcccacagagatgacaaggagtaagaaaattgctttccttctgcctcactcaacatgatctttcctttcttaccagtggctgacaaaacagcctacttgatgggcctgaactcttcagacctcctcaaagccttgtgctttcccagagtgaaagttgggaatgagtacgttacaaaaggccaaactgtggaccaggtaaggactacctcaagtgcaggaggggcggaggaccctcatggccgcagccttcttaccagttcactggcctttcctccgacaggttcaccatgctgtgaatgctctctccaagtccgtttatgagaagctgttcttgtggatggtcactcgtattaaccagcagctggacacaaagctaccaagacaacacttcattggggttttggacattgcgggttttgaaatttttgaggtttgtattatttatgtcttatctcttcatacgggagttttcataatcctaaaaagagggtaccaagatggttttcttgtaggaaggatagaaggagtgagatggatagaagaaagacagaacatcaggacagtgcgtgttattttaagacaattggagaggcctgggagatgattgactcagtaaactgcctgccttgaaagtcgggagagctcagtatgatttctagactactcaagttaaaaaacaaaacaagctgggcgtggtgatgtgttctcagaagtggagatgcagagacaatcagatccttggggctcgctggccagtcagcctaccctacccagaaatttccaggccaagaaatcctgtggagttaaaaaaaaataaagaaaaagaaaaaaatatgggtattggatgttgcttggggaatgacacccaaagttgtcttctggcctctgcaggggtatacacacacacacacatgcctgtgcacccacacgtattgtgcacatgtgaatatttcatacatgctgatacacacagggctgtagtccttccttcaagtggactttcacaagatatcaccaaatgggtagaattaagaaaaatctaatagggggccagagaagtagatactgtcaatcatgtactagttgacataattctctgactggttctgagttaggagcaaatgtgtgtatttagtgtttgccaggtggcagccatgcaggtggggagatgggaagcttgtagtttagttgagaagaaacagaagcctgtcgggcatgcagaagcacaggaggggcccagaggcgggagaaccatgtaggtggaaggctcgtgattggctctgaaagcatagccaagcaggtgggacctgacccttgagaaggaattcagactgcgttttccattttgaaagaggtttgattttttcgcatgcacgttttattttggcgccagtataacagcctggagcagctgtgcatcaacttcaccaacgagaaactgcaacagtttttcaaccaccacatgttcgtgctggagcaggaggagtacaagaaggaaggcatcgagtggaccttcatcgacttcgggatggacctggcggcctgcatcgagctcatcgagaaggtatccccctccgtctgctctgtgccccctccctccccatgtgctttctgctcctgtttactctgctgcttcatctccccttcagccgatgggcatcttctccatcctggaagaggagtgcatgttccccaaggcgacagacacctccttcaagaacaagctgtatgaccagcaccttggaaaatccaacaacttccagaagcctaaggtggtcaaaggcaaggccgaggcccacttctccctcatccactatgcgggcaccgtggactacagtgtctcgggctggctggagaagaacaaggaccccctgaatgagaccgtggtggggctgtaccagaagtcttccaacagactcctggcccatctctatgccaccttcgctacgacagatggtaagtaacggacttcagacacaggagctttgtcttcacacaatcttcctttcccacggcacccaaaagtcgcaatacatccactcacagtgcctgggccctttggtgtctttcagctgacggtgggaagaagaaagtcgctaagaagaaaggctcttccttccaaacagtgtctgcgctgttcagggtaggacaaatttgagttaatccactcacagttcacctgagtcacagcaaaatgagcaccgttgagatcctaggcctggtttattcaagagtagtaatgctggctgcctgacagctctctcagagtgagatcaattgacagtctgacaatatacagatgaggtttaacaaatgtggggcctgggtttgttccatcgtgtactgtaactagcaggtctggctggctgggggcagtgagttctcagttccaattatctagttgcctgcagtagtacccaggcccctggcagggacagacacattttctgcgtagatttcagaaaccattttgtagttggtggccatcttgcaacctgggagaaagatgactgaggcaggtcacatttccctgtgtttgggaccaaacataagacttcagttttcttcttcttttttgattaatccgtatataatgagatttctcaaggatgggacccaaatctaaacacgacgttcatctgtgtgtttcatatatgccttgtgcagcaaggacgtagatcgttttacatggtatatgatcatgtaggctgttttgcctacataaggtgggacgttcgatttgtgtatcatgtttgtactcaaaaaaattcagatttatagaagaaaaacactccagatttttagagcactttagattttagattttcaaggtggggatgtccaagtcacggccgttgtctacgtctctaggttcatgactattcaaggacagagttaacgtcacaactcttaagttgaagccatagagtttagttttcaccaccacgcaactatctgtctccgtggaagttcacagtaggctgccaaaggaaatgtttattttttttcttttaggaaaacttgaacaagctgatgtccaatttaagaaccactcacccacactttgtgcgctgtataatacccaatgaaaccaagaccccaggtaagacgcctgccagccctgaggttaccgctcagtctttaaggacctgtgggtgaagctcgggtatcctgcctgtgttcttaggggccatggaacacagcctggtcctgcaccagctgaggtgtaacggggtgctagaaggcatccgcatctgcaggaaggggttccccaacaggattctgtatggagactttaaacagaggtacaccgtcaaaatgctctgtttgtcctttgacatggataagggttgggatttgagggaagaaatattacatgaaaagacccatttcaaaaaggcagttttggttggtcttccatgtctacggtttggtcgaggttcatgctcctgtgctgtccacgtttctttggaacttgtctgatatacaacaggggagggaaagaaagccctggtccaggagtcccacggcctagatcccagcaaagtggctatgggaaggttgctttacttcctgggaactagactttctggtctgtaggaagcgatgcctgcaatcacagagcactgccaacagcctgatcgtttccgtgtccaccatggcagataccgagtgctgaacgccagtgccatcccggagggccagttcattgacagcaagaaagcttgcgagaagctcttggcttccattgacatcgaccacacacagtacaaatttggacacaccaaggtgatgtatcagttccgcctcgtgctgtaggccttcgcatcctcttaacacaatgagccgggcagctcattcctctcacccatccttttgaaggtgttctttaaggctggcttgctgggaaccctggaggagatgcgggatgagcgtctggccaaactgatcactcggacacaagccgtgtgcagagggttcctcatgcgtgtggaattccagaagatgatgcagaggaggttgggcggggtcttggtttgagcatgagctctttgagagagggtggaagtgggaggagagaatcccttgtaggaatgggcaatgctctgtctgatgagacgtggtttctctgggtagcccctatgctgtcctggaactcactctgtagactaaattggcttcacactcaagtgatttacctgcctctgtctcccaagcactagaattaaaggcatgcaccaccactgccaggctgctttaaaaaaaatgcctgcactatctgtctatccatccatccatccatccatccatctatcctatctaatctatctatcgatctgtctgtctatccatgctttttgtttatgtgagcaagtacgtatgccaaggcacacttgtagcagtcagaggaccacttgcaggagtcagtccttgactcactatgtggggcctgagaatcgggcctggcttcggcaccttttccctgctgagccgtcttgctttgtttgcagggaatccatcttctgcatccagtacaacatccgcgccttcatgaacgtcaagcactggccctggatgaaactcttcttcaagatcaagcccctgctgaagagcgccgagacggagaaggagatggccaccatgaaggaggagttccagaagaccaaggacgagctcgccaagtcggaggcaaagaggaaggagctggaggagaagctggtcactctggtacaagagaagaacgacctgcagctccaagtacaggcggtatgtccttaggactcttgctttttcaaatccgagattggattacgattttaggaaatctggattaacccgagggcggggcatgggtgggcgttgggtttttcttggagtgcttcatggaggatttcacaaagaaagatggcagtgtttcaaaccttcgctccttaaagggaattgtgatttctttttaaaggagagtgagaatttgctggatgccgaggagcgatgcgaccagctgatcaaagccaagttccagctggaggccaaaattaaagaggtgaccgaaagagctgaggatgaggaggagatcaacgccgagctcacggccaagaagaggaagctggaggacgagtgctcggagctgaagaaggacatcgatgaccttgagctgacactggccaaggttgagaaggagaagcacgccacggagaacaaggtacacacgttcttcttgcggtctctcttcagcttgatgtattcactgctaagcaagctcggcttcttttaggtaaaaaaccttaccgaagaactggcaggcctggatgaaactattgcaaagctaacacgggagaagaaggccctccaagaggcccaccagcagaccctggacgacctccaggctgaggaagacaaggtcaattctctgagcaagctcaagagcaagctggagcagcaagtggatgatgtgagcactgggcatcagtctctggagtctggaggcttcagggcggaagagccctgggcaggggcggggctggggttatctaccggaaatcatctaatcctaaaggggaaatgatgcctcttgcagttggagagctccctcgaacaagagaagaagctgcgtgtggacctggaaaggaacaagaggaagctggagggagacctgaagcttgcccaagagtccatattagatctggagaacgacaagcaacagctggacgagaggctcaagaagtacgtgtcccccaaacacagcttccgttccgtgagtggcggggtgcgggggatcccgtcttcacgcatcctctgtgtcctgccgcaggaaggactttgaatatagccagctgcagagcaaggtggaagatgagcagacgctgagcctccaacttcagaagaaaatcaaagagttacaggtaggagggggcgatcaactctcgcttgccggtgtgggtcactcagaaacctgagcggtgtctgctaaagtcagagtaggtacggtaggaccgagactgcctcatgggacctcactctgacaggctgacatagcagtggtggccgtgatgaccacgtcccccaaacttgcaacaggatacatggaggtggatggagaaatgtccagggtagttagtgaccatatgggggcaggaaaagattcatttggaagaaaatcagcagcatttgtttgtttgggggaacatccacgagcagattcatctggtggggacataacctctcctccatcgtcatcgtcgtcatcgttgtcgtcgtcaccatcatcaccaccatcatcatcatcatcatcatcatcatcatcatcatcaaattttatatattaacgggcttccatgtgctggttcatcatgtgcttatactattcactgatccagccccctcttaatcacttcccccaccttcctcacctttagcaaacaccgtttcatattcagattgacctaaacaaaattttcaggtgaaaacatgcaccgattgtttttccggtgtctagcgtcctccattttgctgcaaatggtagggcttctttttatagacgggtcatacattcgtggtcgatgacctctactcagacgccatgttagctgttgtgactctgagagtctcttgggcatctggctgctctctataggcccgcattgaggagctggaggaagagatagaggcggagagggccacccgggccaagacagagaagcagcgcagcgactacgcccgcgagctggaggagctgagtgaacgtctggaggaggcgggcggtgtcacctctacccagattgagctgaacaagaagcgtgaggctgagttcttgaagctgcgcagggacctggaggaggccaccctgcagcacgaggccaccgtggccacgctgcggaagaagcacgcggacagcgcggcggagctggcagagcagatcgacaacctgcagcgcgtcaagcagaagctggagaaggagaagagcgagttcaagctggagatcgacgacctctccagcagtgtggagagtgtgtccaaatccaaggtgaggggtcggctgaggagaccgaaggggcacctgcagtgggtcaacctaaggtcacctgcagacctccttcctctttccaatctgcaggccaacctggagaagatatgccgaactctagaggatcagttaagcgaggccaggggcaagaacgaggagacgcagagaagcctaagtgagctgaccacacagaagtcccggctgcagacagaagcgggtgagccaagccccggatgctatgcctgggtgccaagctggagcgccagaaggctttccgcccaggggcagcagcaccctttgcggggagagaatgttttgttttgcttgctttattttaaaggcagggtcccactctacaaccctggttgacctggaattccttgtgtaaaacaggcttgtctggatctgcctgactctgcttctacaaccctgtttttaaaggcctgcatcaccacacctggtgagggaggctttctaaaaacacaatttcaggaaaaagtcaatggaagtaactcacagaagaggctgtcccaaacctcctggagaacactgagtgtcctcagtgaaaacaggaagcgagcagacggtcaaacttccatgagtgatacaagtttgcatctgacatagcctggatgggaccaggaggagtctagcctttctgcttcctgcccgccttcccgtctgacttctgcatacaccttagctgacccatattcacccaagagtatacttttgaatttccagagagacgaaatcctaagtgacacagctggaatcaccaaccactggggaggtgctttgggagtggagaggtgccctggtgatgttcaaactcataatggttctctcggctttcgctggcagaggtcactcctggttttgtagggtttacagcagtattttattaggctgctatttccttttcatggacacacccctactctcaagatggggtgaggggtctcacctttattacttgcaccaccaccccacccccaatttggcacagtggttacagttggtttttgagtgagtgaatgaatgaatgaatgaatgagctgtttccttcctgacacaggtgagctgagtcgtcaactggaagaaaaggaaagcatagtatctcagctttccaggagcaagcaagcctttacccaacagatagaggagctcaagaggcaactggaggaagagaacaaggtaccccgctcagaaggatgttttcttggtctcattttcaaatggcttctgcaaaataacaacaagattacctgacaattcagccagtgctgagaacagggcacgtggcacgtgtgctgcacacagtcctaatccatccggggaccttttgatttttttttttaaggccaagaatgcgctggcccacgccctgcagtcctcccgccacgactgtgacctgcttcgggaacagtacgaggaggagcaggaaggcaaagccgagctgcagagggcgctgtccaaggccaacagcgaggtggcccaatggaggaccaaatatgagacggatgccatccagcgcacggaggagctggaggaggccaagtatgtgtctctaattagaacccttaaggatctcatggcttagcacattggctctagagtggctccgggatgaagctaatgaatgtatctgttttgttactggaggtttccccatcaagagagtctttaaatgtaacattggctgaaatgtgaaatgtaacagaatgaactacttcagtctaacgctctcccaactgagctatttcggcgctgcaacagaatgaactactatagttcattgacatcaactttgatcctggttagacctgagaaaggccactgatcacagactctgagcagatgggggattctcttaaggttttttcgcagaggcatgtgagccaggcaattagtgtctccggggtggtgagcagcgatgctcaagaagattgaaacttaatggcgtcggctttcttttcattttcttgaagaaaaaagcttgctcagcgccttcaggattcggaggagcaggtcgaggctgtgaatgcaaaatgcgcttccttggaaaagaccaagcagaggctgcaaggggaggtggaggacttgatggtggatgtggagagagccaactctctggctgccgctctggacaagaagcagaggaactttgacaaggtgcgggggtgctccgtgctggctgagctccacggtgtggcatgttgtaggactgtaggagacagggataggctgcctgctctgcccttctttagcatggtggccataaaaacactcctcgaacttcactagcagtttgtttctccatctgtgacatgacctgggaatgggatgaggcagagaaatcccttccgatgaccgttgtagcagtcacacagtttccatcgctcatacctgtatctttaggggctgagacttcaacttaggcccctccctgtgacagacaagcatgatttgaaccactgctttaatgaaatacatccgttcagagcctttttctttttgttattaggaaaagggtaattatgtctagctaattttttctttaagaattcatttgctttctggatatgacagtggttactgactgattatcttgagtaagcgaatgaaatgaaatctttgctcgttcagtaatctagaccaggccctagctctgagagtagccacttcaggggatgacattctgttagaagctcggcagagagctccctgacagaatctttccacgctgctgctgcaggtgttagccgagtggaagacgaagtgtgaggagagccaagcagagctggaggcggctctcaaggaatcccggtccttgagcactgagctcttcaaactgaaaaacgcctatgaagaagccttggatcaactcgaaactgtgaagcgagagaataagaacttagaacgtaagccattccgaaccgcctgaggtcgtgggaaacccagagtgtgcgagggcgggtgaggctccgttattcaggctcctccacaccgctcggctgatgcaccggtagaagccgctcaccgttgacaagcagttgttctgggtctctatacaatatcttatctctgagaagcagagggttttagagtcccagagagctattgaaaggcatttagtgggtgcttcgcattcccggagcctgtgtggcggcgtccaaacgcagtgcaaacttacttcattgcagaagagatagcagatctcaccgaacaaattgctgagaacggtaaaagcatccacgagctagagaaatccagaaagcagatggagctggagaaggctgatatccagatggcgctggaggaagcagaggtgaggatgggtcgggaggcacaagccagaacagagggcaacagtgtgtgtctgaggcgttcacacttcacgcttctgaaatccagattctaaggctcgctccttccctctgactgcgaggctgagtgagatgatgcccgtgagttatcttacatgtattggagagaatcatcacgataaaataggcttactcttgaaagtttacaaacccttagctgaggttagaatagctgtaaggcgcttcttgcccttaagtaacgagaacattgtaaatacgtttcgtgtccaagcgcacgatcataaacgaataaccgtaaaatggttcgcttctgcactgaaggtaagttagtttatttaaaggtggctttgactattatgggatttgatttaggactatctcctcagagctttgctgacccaatgtcgtgtgaccggctctaggacagtgcagaaacggttcgtgtttttttgttttgtcttttaaaggcagctctggagcacgaagaagccaagatcctcaggatccagcttgaactgacgcaggtgaaatcagagatcgatagaaagatcgcagagaaggatgaagagatcgagcagctgaagaggaactaccagaggacagtggagaccatgcagggcgccctggatgctgaggtgcgcagcaggaatgaggcgatccggctgaagaagaagatggagggcgacctcaatgagattgagatccagctgagccatgccaaccgccaggccgcagagaccatcaagcacctccggagtgtccagggacagctgaaggtggacggagcttccgggggtggggggacttttccagtgtccagatccgaaaagactaggcaaggcttgtggtccttggccctcacttcacacactttctcttctggccaggacacccagctgcacctggatgacgctctccgaggccaggaggacctgaaggagcagctggcgatcgtggagcgcagagccaacctgctgcaggctgaggtggaggagctgcgggccactctggagcagacggagagggcccggaagctggcagagcaggagctgctggactccaacgagagggttcagctgctgcacacccaggtgagggcaggagcattggggtacgagggtccacctcagacgctgtgtatgacactccctcctcctcctcagaacaccagcctcatccacaccaagaagaagttggagactgacctcacacagctccagagtgaggtggaggatgccagcagggacgcaaggaacgccgaggagaaggccaaaaaggccatcactgatgtgaggcccctgctcccttcctactgtgaccgctgatattgtgtctcattaaagccctgctttcccccaaccccacgcatgcttggtagaagtccaccctcttaggacacacatggtgtctgtgctgaccccagaccactcccaactcccctcgtattgactgttcccccttgtactgtccaaagccggcagatgggggaagggcaggataggagtatactttttctcctgcctcccgagaggtgtttctttcacttgcatctggaaatgagaccctctgatggtgttcacattccaccacatggctcctttcctctctaacgttcctggggctccaggctttctgcttcaggctgatggcgccacctactgccctctacgggatatcaccccaatgctgttttactttgctgtagtcgttcgttacttaatgagtccctccttgatgggattctgttgtctcaggataatctccaagccttaggatcttttgaaactgtgtgttggtgatgattttttttttaaaagacctcctgggctttggacaggtctcaaggagagcaggtttaggagactgctcctcactcagtccttgtagagtttatttaataaaatttatatcccaggtgtagcttttgtcttgtttcaacgtgggaagtgtgcttattcacgaccgtacccgctgtcctttctgtaaagcatgctctctgttcactgtggaattccggcttccacagccgcaagatctttgagccttgcctttcaggccgccatgatggcggaggagctaaagaaggagcaggacaccagcgcccatctggagcggatgaagaagaacctggagcagacggtgaaggacctgcagcaccgtctggacgaggctgagcagctggcactgaagggcggcaagaagcagatccagaaactggagacgagggtacttgccgagggggagactgcctggccaagccttgccaacctcctctcccctccccacattcagagcccagcgctagaataacgtcccaaacatctctccagatcagagagctagagtttgagctggaaggggaacagaagaggaacacagagtctgtgaagggcctgaggaagtatgagcggcgtgtcaaggagctcacctaccaggtaggtgcaaaggtcacctaagacaagttttctctccaacgtacaaatactactcaaagcttggaattggacacttgtgcacccctggactggctgggccctggtacaagtgccccccccccccatcccttcattcatttgcagagtgaggaggacaggaagaatgtgctgagattgcaggatctggtggataaacttcaagtgaaagtcaagtcctacaagaggcaggctgaggaggctgtaagtcagacgcatgcgtagcctgttctgtttcccacggtggggtgggttggggagtgggggcggggtggggtgggggagtgggagggaccggagagaggatcatgcagatttcacccgctgagctctttcctttaggatgaacaagccaatgttcatctcaccaagttccggaaagcccagcatgagctagaggaggccgaggaacgtgcggatattgcagaatcgcaagtcaataaactgcgggctaaaacccgggacttcacctctagccgggtaagctgacctgggaacgcccaccgaaatgctactttcgccgtcggagactctcaagctcagagaaagaatgttctttacagccatttacctgggtggagctctactagaaacacctttgtaaaaaaaaaaaaaagcattgtctctttagcgccctctgctggtattagatgggttgtttaggaacatccgctaaaggtggccgcagatatctgcaattactgtaaccacaaatccactgtggctcctacaccaatttctcaggctgtggagcaatttcatgtgggccatcatgcatcttccaaagggccccctaattccttgtgtcccgctgaaatatacaaacaactctttgatgcttgcgagaagaggggtccagaaagtgtctctgttgcctgacttgactgagagcatctgcgttctctctagatggtggtccatgaaagtgaggagtgagcatgtcctcctggtgaggggcagaagatatgcagaatgtatgttttcgtggctcctgaccatcctgcttaatttccacgtaacccctttccacatgcaataaaatttgccttgtttcaagttgggtcttttgtcttgtgcatttctctcatttcctcagaggagtttattcctcttttggcaatttttatgctgggtgctgaaatattagcaagcagttgtctttgtagattaaatctgtgtgtgtgtgtgtgtgtgtgtgtgtgtgtgtgtgtgtgtgtaaggggatggcttttgatttaaatttgaacttgaaaaattcaagatacttccaactaagcattgcttcagtggggtgggggagggagagtttatgaaagtcatctattaatatcatataagcgagacacgaaggttgggttcaggaacgcctaatttcaaactggggaggattcctctcctgcacatttttactagggaaatgtatctcaaagctaataaataatggttgggctccatacaagatatgaccgaatgccacggtgtctggtactgtcaagagctcagaggacagtgatagagctcttgtctcagatacacagggctctgggttcaactctcagcgctgccaacaaacaaatgaaaaaacaaggcatttaaaaaatagggcaggaaaggaattc

SEQ ID NO: 557 - DNA, 3259 bp, Rattus norvegicus (Norway rat)
cagctccggcgggcagcaggcgctggagcgcatcgcagttcagctcagcgcagcaccatcggtctgcggagcggactgagctagaagcggagcgctgacgccggaggcgtgcaatgaggagggcaggtgctgcctgcagcgccatggaccggctgcgcctgctgctgctgctgattctaggggtgtcctctggaggtgccaaggagacatgttccacaggcctgtacacccacagcggagagtgctgcaaagcctgcaacttgggcgaaggcgtggcccagccctgcggagccaaccagaccgtgtgtgaaccctgcctggacaatgttacattctccgatgtggtgagcgccactgagccgtgcaagccgtgcaccgagtgcctgggcctgcagagcatgtccgctccctgtgtggaggcagacgatgcagtgtgcagatgtgcctatggctactaccaggacgaggagactggccactgtgaggcttgcagcgtgtgcgaggtgggctcgggactcgtgttctcctgccaggacaaacagaacacagtgtgtgaagagtgcccagagggcacatactcagacgaagccaaccacgtggacccgtgcctaccctgcacggtgtgcgaggacactgagcgccagttacgcgagtgcacgccctgggctgatgctgaatgcgaagagatccctggtcgatggatcccaaggtctacgcccccggagggctccgacagcacagcgcccagcacccaggagcctgaggttcctccagagcaagaccttgtacccagtacagtggcggatatggtgaccactgtgatgggcagctcccagcctgtagtgacccgcggcaccaccgacaacctcattcctgtctattgctccatcttggctgctgtggtcgtgggccttgtggcctatattgctttcaagaggtggaacagctgcaaacaaaataaacaaggcgccaacagccgccccgtgaaccagacgcccccaccggagggagagaaactgcacagcgacagtggcatctctgtggacagccagagcctgcacgaccagcagacccatacgcagactgcctcaggccaggccctcaagggtgatggcaacctctacagtagcctgcccctgaccaagcgtgaggaggtagagaaactgctcaacggggatacctggcgacatctggcaggcgagctgggttaccagcctgaacatatagactcctttacccacgaggcctgcccagtgcgagccctgctggccagctggggtgcccaggacagtgcaacgcttgatgcccttttagccgccctgcgacgcatccagagagctgacattgtggagagtctatgcagcgagtccactgccacatccccagtgtgaactcacagactgggagcccctgtcctgtcccacattccgacgactgatgttctagccagcccccacagagctgccccctctccctcggggatggcccaacggtcagaacggagcatctctgtgcagggcctctgtgttcccactcctgactccgttgctgctcccgagggggcccttgcttctgaccaccctctcctcagcaagagagagagagaggaccacccgagcctgacttgctccatttccatctcaggcctttccttcctttctacacattagctgtgtcagatctgggggtttgacactaggagaagggagcgggggcacccctaagactcaggaggtactgaagaaccagagccatggactccacactgtgaaccggagaacaaggggcggggcattgtggtaggctagaccttccttagcccctcccttctcccctctggccaaagaagaggattacggacctatctgagctgaaagcaggtttggaacccagcccacacttctctctcacacacaggatggtaaaacccagagaaaggcagggactgacctaggccacccaaccacaggaagaacaaatgaaggctgatacactccgtttctgaatgagggcgtcaagtgtgcttgttgacagggatggcgtgactttcagggaaatatctggaagccatgtctgccccgccctcaaccacttccaggcccctacccaacccttgtgcagatgaactgtttgttcaagggctggtccattggtctattctgatggagtcaagctaagggctcaggcttatccataaggcatttgtggagagatgaatctgttagtgcgctcattcttggcataagcctgaagccaacacggcccttaatgtcagccctcggggtcaggaaccaaggactcccaccccacaatccaacactatactacattacacacacacacacacacacacacacacacacacacacacacacacagatatcttgcttttctccccatggctcttttggggctgagactagatcctgctgggagtcactgccagtgagagatccggaggggacagagctgagcttcatggggctgtcttcctcgcccccgggtctggcaggccaagaatgactgcatctgagctggtgtctgtcttccaatggcctgtgcgtggaggaaatgctcccactcctccccttcttgaagctgcccccagaagactacagtgcaaaagagcagactggtgtgagaacacaagaaaaagcagatgctggccctgcagtctgtggcagctttctcctcagcttcaaggcccctgcaaaggacggatttcctgagcacggccaggaaggggcaagagggttcggttcagtggcgctttctcccggctccttggcctgttctgttttgcttgctgttggaatgagtgggcaccccctctatttagcatgaaggagccccaggcagggtatgcacagactgaccaccatccctccccacccagggtccacccaacccggtgaagagaccaggagcattgtacgcatacgcgggtggtatttttatggaccccaatctgcaattcccagacacctgggaagtgggacattctttgtgtatttattttcctccccaggagctggggagtggtggggggctgcaggtacggtttagcatgtgtttggttctgggggtctctccagccttgttttgggccaagttggaacctctggccctccagctggtgactatgaactccagaccccttcgtgctccccgacgccttccccttgcatcctgtgtaaccatttcgttgggccctcccaaaacctacacataaaacatacaggaggaccattaaattggc

SEQ ID NO: 558 - DNA, 1121 bp, Rattus norvegicus (Norway rat)
aagatgaactctcaatcctaaatatctatgccccaaatacaagggcacctacatacgtaaaagaaaccttactaaagctcaaagcacacattgcacctcacacaataataatgggagatttcaacacaccactctcatcaatggacagatcatggaaacagatattaagcaatgatgtcgacagactaagagaagccatgagccaaatgggcttaacggatatttatagaacattctatcctaaagcaaaaggatataccttcttctcagctcctcatggtactttctccaaaattgaccatataattggtcaaaaaacgggcctcaacaggtacagaaagatagaaataatcccatgcgtgctatcggaccaccacggcctaaaactggtcttcaataacaataagggaagaatgcccacatagacgtggaaattgaacaatgctatactcaatgataacctggtcaaggaagaaataaagaaagaaattaaaaactttttagaatttaatgaaaatgaagatacaacatacccaaacttatgggacacaatgaaagctgtgctaagaggaaaactcatagcgctgagtgcctgcagaaagaaacaggaaagagcatatgtcagcagcttgacagcacacctaaaagctctagaacaaaaagaagcaaatacacccaggaggagtagaaggcaggaaataatcaaactcagagctgaaataaaccaagtagaaacaaaaagtaccatagaaagaatcaacagaaccaaaagttggttctttgagaaaatcaacaagatagataaacccttagccacactaacgagaggacacagagagtgcgtccaaattaacaaaatcagaaatgaaaagggagacataactacagattcagaggaaattcaaaaaatcatcagatcttactataaaaacctatattcaaaaaaacttgaaaattttcaggaaatggacaatttcctagacagataccaggtattgaagttaaatcaggaacagataaaccagttaaacaaccccataactcctaaggaaatagaagcagtcattaaaggtctcccaaccaaaaagagcccaggtccagacgggtttagtgcagaattc

SEQ ID NO: 559 - DNA, 696 bp, Rattus norvegicus (Norway rat)
ctctttccagccagcgccgagcgatgggcatctctcgggacaactggcacaagcgccgcaagaccgggggtaagagaaaaccctaccacaagaagcggaagtatgagctgggacggccggccgccaacactaagattggccctcgccgcatacatacagtccgagttcgaggaggcaataagaagtatcgtgctctgagattggatgtggggaacttttcctggggctcagagtgttgtactcgcaaaacaaggatcattgatgttgtctacaatgcatccaataacgagcttgtccgcaccaagaccctggtgaagaactgcattgtgcttattgacagcacaccgtaccgacagtggtacgagtcccactatgcactgcccctgggccgcaagaagggggccaagctgactcctgaggaggaagagattttaaacaaaaaacgatcaaagaaaattcagaagaaatatgatgaaaggaaaaagaatgccaaaatcagcagtcttctggaggagcagttccagcagggcaagcttctcgcctgtattgcctcaagaccaggccagtgtggcagagcagatggctatgtgctcgaaggcaaggagctggagttctatctgcggaagatcaaagcccggaaaggcaaataaactgtcatagctcgtgtaataaaggtgtttgctgttctgtatatgt

SEQ ID NO: 560 - DNA, 1361 bp, Rattus rattus (black rat)
ccagccagtcgccatcaggaacctcgagaagctgctccagctatgtgtgaagaggaagacagcacagctctggtgtgtgacaatggctccgggctctgtaaggcgggctttgctggtgatgatgctcccagggctgttttcccatccatcgtgggacgtcccagacaccagggagtgatggttggaatgggccaaaaggacagctatgtgggggacgaagcgcagagcaagagagggatcctgaccctgaagtatccgatagaacacggcatcatcaccaactgggacgacatggaaaagatctggcaccactccttctataacgagcttcgcgtggccccagaggagcatccgaccttgctaacggaggcgccgctgaaccctaaggccaaccgggagaaaatgacccagattatgtttgagaccttcaatgtccctgccatgtatgtggctattcaggctgtgctgtccctctatgcttctggacgtacaactggtattgtgctggactctggagatggcgtgactcacaacgtgcctatctatgagggctatgctctgcctcatgccatcatgcgtctggacttggctggccgagatctcaccgactacctcatgaagatcctgactgagcgtggctattccttcgtgactactgctgagcgtgagatcgtccgtgacatcaaggagaagctgtgctatgtcgctctggactttgaaaatgagatggccactgctgcttcctcttcttccctggagaagagctacgaactgcctgatgggcaggtgatcaccatcgggaatgaacgcttccgctgcccggagaccctcttccagccatctttcattggaatggagtcggcgggcatccacgaaaccacctataacagcatcatgaagtgtgatattgacatcaggaaggacctctatgctaacaacgtcctctcggggggcactaccatgtacccaggcattgctgacaggatgcagaaggagatcacagccctcgctcccagcaccatgaagatcaagattattgctcctccagaacgcaaatattctgtctggatcggcggctccatcctggcttctctatctaccttccagcagatgtggatcagcaaacaggagtatgacgaagctggcccctccattgtccaccgcaaatgcttctaagtcacgcccccaccctccgccccgcccccacccccgccccgcccccgctctgtctctagcacacaactgtgaatgttttgtggatcagcgccttcagttcttttccaaatcattcctacctaaagctttgatttgttactcgtgtgtttttttttaataaatcagacatgtgctacccttctaaa

SEQ ID NO: 561 - DNA, 2134 bp, Rattus rattus (black rat)
cgctgcaccatgagcgtctctgcactgagctccacccgcttcacgggcagcatctctggcttcctccaagtggcctccgtgcttggtctgcttctgctgctggtcaaagcagtccagttctacctgcaaaggcaatggctactcaaggctttccagcagttcccatcacctcccttccactggttctttgggcacaagcagtttcaaggtgacaaagaactacagcaaattatgacatgtgtggagaatttcccaagtgcctttcctcgatggttctggggaagcaaagcctacttaattgtctatgaccctgactacatgaaggtgattctcgggcgatcagatccaaaggccaatggcgtctacagattgctagctccttggatcggatatggtttgctcttgctgaatggacaaccgtggttccagcaccggcgaatgctaaccccagccttccactatgacattctgaaaccctatgtaaaaaacatggctgactccattcgactgatgctagacaaatgggaacagctggcaggtcaagactcctctatagaaatctttcaacatatctccttaatgaccctagacactgtcatgaagtgtgccttcagccacaatggcagtgttcaggtggatggaaattacaagagctatatccaggccattgggaacttgaatgacctctttcactcccgtgtgaggaacatctttcatcagaatgataccatctataatttttcttccaatggccacttgttcaaccgtgcttgtcaacttgcccatgatcacacagatggtgtgatcaagctaaggaaggatcagctgcagaatgcgggagagctggaaaaggtcaagaagaaaagacgtttggattttctggacatcctcttacttgccagaatggagaatggggacagcttgtctgacaaggacctacgtgctgaggtggacacatttatgttcgagggtcatgacaccacagccagtggagtctcctggatcttctatgctctggccacacaccctaagcaccaacaaagatgcagagaggaagttcagagtgtcctgggggatgggtcctccattacctgggatcacctggaccagattccctacaccaccatgtgtatcaaggaggccctgaggctttacccacctgttccaggcattgtcagagaactcagcacatctgtcaccttccctgatgggcgctctttacccaagggtatccaagtcacactctccatttatggtctccaccacaacccgaaggtgtggccaaacccagaggtgtttgacccttccaggtttgcaccagactctccccgacacagccactcattcctgcccttctcaggaggagcgaggaactgcattgggaaacaatttgctatgagtgagatgaaggtgattgtggccctgaccctgctccgctttgagctactgccagatcccaccaaggtccccatccccttaccacgacttgtgctgaagtccaaaaatgggatctacctgtatctcaagaagctccactaattccggacttcttcattataccaataatcaacggtcacaaccttgatggtcgggaataacaggacgttattatcttacagttgtggagctccgaaatctgaaatgagtttcactggcagaaagctgagttggtggtgtgactagccttcttcagaagagtgcttcagagagtcctctcctcctctcttcagtacagatcacccttctcagcactggaatattcctctgctttaaagccagcacccttcccataccccctcttctaaaagccttcccttttacaaatgttcttatgacatcatcaagaccactgaaaaactccaagataatttcccatctcaatattccttactccatctaacctactaagtcccttttgaattatgaggaataattcaatttgttccatgggctccaaaactcaaggcctgagcattattgtgaaacctttattcagcctaatatcatcttcacaagactgttacctggtacgttcatctaaatctcccctgcatagtctctctacctgactattcctcacacaagtttctttaccttccctcctttctccaataaagtgtccagtgtcctgcac

SEQ ID NO: 562 - DNA, 2481 bp, Rattus norvegicus (Norway rat)
gatctattagacacaaaacctaaccagagaaggaaatatgcggacctgaacctttgcagacaaagcttcctccctctgctcagttgtaagctacttggtctgagccgtctgtgtaccaaagagtggacaaggcagtcaggatagcagaaatcaaacacatggcatcccaccattgtgcggcgcgtgtcacagagggaaagacaggagtgtaacccacactgagagtggtagggagacgcgggtggtggaaatgcatcaaaaacaatgatgttcacggtactcgtcagagcattttctacccgtttgttttaaaacattcttttcctcttcctgttttccactttcccaccatccacctaaattcctcagccgaccacgtaggctcctatggtataactgtgtatcagtatcatgaatccaaaggccagtacacacatgaatttgatggtgacgagagattctatgtggacttggataagaaggagaccatctggaggatccccgagtttggacaactgataagctttgacccccaaggtgcacttcgaaatatagctataataaaacacaatttggaaatcttgatgaagaggtcaaattcaaccccagctgtcaacggtacgtgctcaccaccctgctcccccctcccttccctggggggttaggggatgtgatcaggacattaatggtccaataaaatcctctcctttccaaggagaccccggatctcttcatcactggagactcatcccctctcttcttgtttttaaagatttatttatttattatatctaagtacacggtagctgtcttcggacacaccagagagagggcatcagatcccattacagatggttgtgagccaccatgtggttgctgggaattgaactcaggacctctggaagagcagtcagtgctcttaaccactgagccatctctccggcccatcccttctcttcttaaaaatcacacatttcatgtaatatacagctcactattccacaatgctctcctcgaatcttttggaaaagccccgacagacatcctacctgaactccctagacgagaggggcacagggatcaagtggagggcacattagctccaagcagaggaatcgggctctttgactttcatatgtgtaagacttgtcaagaaggctctctcactagacagtgcagggcttcagggagagaagctcccatcagcctctgacatccagaccatttcctttgcagaggttcctgaggcgaccgtgttttccaagtcccctgtgctgctgggtcagcccaacaccctcatctgctttgtagacaacatctttcctcctgtgatcaatatcacatggttgagaaacagcaagccactcacagaaggcgtttatgagaccagcttccttatcaacagtgactattccttccacaagatggcttacctcaccttcatcccttccaacgacgacatttatgactgcaaggtggagcactggagcctggacgagccggttctaagacactggggtgtgtatgagctctgccacttctggcactttctcgttcactgtcacttctggaacagcatggcttctggcttcaagtgaccaaaactcactttccactcttaaagtttctaaggctagagttcgtgtcatcccattagcccagcctcagagaccagtaggttaactcctcctcacctggtcctgtcttacacatacatgagtcccttctgactcaaagcttctctctctcagaacctgagattccagcccccatgtcagagctgacagagactgtggtctgtgccctggggttgtctgtgggtctcgtgggcatcgtggtgggcaccatcttcatcattcaaggcctgcgatcagtggctccctccagacacccagggcccttgtgagtcacaccctgggaaagaaggtaagggtttgtgtttgtgggaaacaaaggcacgcatggggaggggaaggaaggggagacatgaaagtttgttgttggaactttgctggagcctctgaacccatctttcctgtgtgttttgttgtaggtgcgtggccctctacagggaagatgtagtgtgtgggggtgacctggcacagtgtgttttctggcccaattcatcgtgttctctctcttctcctggtgtctcccatcttgctcttcccttggcccccaggctgtccacctcatggctctcacgcccttggaattctcccctgacctgagtttcatttttggcatcttccaagtcgaatctactatagattccgagaccctgattaatgctccaccaaaccaataaacctcttataagttgtcttctttgtttttctgtctcccattttggagcttactggagccaggcccatgtaatcctgtgtccagtgtcacaggaataaccaatgcagcccagaatggtttggtatcttagccaaggttgactttcaaatttttttgttcagctgacatctcacg

SEQ ID NO: 563 - DNA, 1857 bp, Rattus norvegicus (Norway rat)
aagcttaaaactttaaaatcgtatgttcttaagttaccaaatattttctattacttcatctctcttgtcttgatcacgcagcaaacttgttttggcacaaattaccacatgaattctagagcccagtttcatatgctattcacagaatgatgtcatggtaatgatgccagccacagacagtgggcttccaacctcaataaattgtacttttcttatgttgtctttttttgtaggaaagacattaaacccttataatccaaaagatcagaagcagggagctcatagccaatctaagtgctacctgcaattctatcaattagaaatgggaccaatctaaggtcactccagggcatctccagggaaagggtacatgtttaatgtcaccaagctaccagcgagtagttcctgggtgcagattcctttagtcatgcacagtagattaattccaagaatgacagtcaagctcctgggcagcaccccgtgagcaaacttgagccttgggaccacaggtaagaccaacttttctgctgcaagagacctgcctggtgatctcgggacatacagaggcagaattcctctaggaccgggcacctcctgtgtttaccgggagtcccacacccgcggatcccggcccgcagcagctctttgctcccagacaccgtgggagagagaccccaccacctggtcaggtgggcactcctgaggctgcagagcggaatagaccaccaacactgcccacccctccctacatccctggcccaagaggaaactgtataaggcctctgggttcccgtgggggagggcccaggagtggcagtacctcttcctctgagacaccgccggaacctgaaggaaacagaccggataaacagttctctgcacccaaatcccgtgggagggagagctaaaccctcagagaggcagacatgcctgggaacccagaagagactgcagtctgcacacacatctcggatgccagaggaaaacaccaaacgccatctggaaccctggtgcactgaagttcctggaaacagcggcgcagatcttcctggttgctgcagccgcagagagctcgagggcagcaccccgagagcgaacttgagcctcgggaccacagggaagaccaacttttctgctgcaagtgacctgtctggtgaactcaagacagaggcccacaggaacagctgaagacctgtagagaggaaaaactacacgcccgaaagcagaacactctgtcgccataacaggctgaaagaaaacaggaaaacaggtctacagcactcctgacacacaggcttatagggcagtctagccactgtcagaaatagcagaacaaagtaacactagagataatctgatggcaagaggcaagcgcaggaacccaagcaacagaaaccaagactacatggcaccatcggagcccaattctcccaccaaaacaaacatggaatatccaaacacaccagaaaagcaagatctagtttcaaaatcatatttgatcatgatgctggaggacttcaagaaagacgtgaagaactcccttagagaacaagtagaagactacagagaggaatcacaaaaatgcctgaaagaattccaggaaaacataattaaacaagtagaagcccatagagaggagtcacaaaaatccctgaaagaattccaggaaatcataaataaacaagtagaagcccatagagaggagtcacaaaaatccctgaaagaattccaggaaaacacaatcaaacagttgaaggaattaaaaatggaaatagaagcaatcaagaaagaacacatggaaacaaccctggatatagaaaaccaaaagaagagacaaggagctgtagatacaagctt

SEQ ID NO: 564 - DNA, 7776 bp, Rattus norvegicus (Norway rat)
ggatcccggcatccgggcttggaaaggggttttagttgagaattaacaaaccattaacagcgtgtacatagtaacaagttggagttactcctaagtcttcccaatactgaatatgtaagtaaccagtcagtcccacttattctttaacaatgtaactttggtgggggctggggatttagctcagtggtagagcgcttacctaggaagcgcaaggccctgggttcggtccccagctccaaaaaaaaaaaaaaccaaaaaaaaaaaaacaaaaaaacaatgtaactttggtggatacaaattcactgcccagactcttttccggtccagacttctcaaagtgacttagttgtagctaccctgaaagatttaacagaataagggacagctgttggcttgaaacccctcaacctcttccctaacatgcgactcttgcttagataaaaggcattatcttagcatgcaactggtgcctagaatctagttggaagctaccaacgtaaaacggagtggctctccagcctctgctggcttgtctctcagcaagttttcaggcataggcacacagggtggtgaagcagggtcaatctacaccacgaagtctagtctacgtggcccgcacacaactcaaggcccatccatcctcggctcgcacctgcgatcccgccagggaataaatactacgcgctgaatgcaaagccgaggaagagttttgctagtcttccaggccagggctcagccgttaggacccggggagagactgcgtgattgaaccggttgcaagacggacgaccaagcgcctgtgcgcatgcaccggccgaatcccgcctgctgcccataggaccctgcggcaagctggtagtcaggactggtggtgtggtgcgcgtgcgcgggcctgccgcagggagtgtccggcacgaggccgggcggggagcgcgggcggatgggcggggggctgggcacgcgcggcgccccgccccactgacgcgccgggcccgcgcctcccgcctccggcgtcgggaaccgggttggccgccaaggagtccccgcccctcccccgcgcctcccggccggaaccgatcggggctggtttgagctggtgcgtctccatgacgacgtgctccgcctataagtagcggcgcgtcgcaccgtcgggctttgtcagtccctgcagccgccgccgccggccgccttcagtcagcagctcggcgccacctccggtcggcgactgcggcgggctcgacgaggcggctgacggggcggcggcgggaagacggccgggtgcgccttggggtttagtggcggcttctccatgggtccagccagccgcttccctgtgctgtgaggtaagcggggcgcgggaggattgtgcggccacgtgtcgcgaggcccggactgcggtcgccggcaggggacacgtggccggaggctggtgaccttgcgagcctccgccctgaaggcagcagctgttcctggcccttggctgcaagccctcggatcgccccatgggagcccgcatcgtgtcagccgggctcggcgctccacttgcccgggcggtgatggagggcaggtgcaggggagcccggccgctagcagccgccctgcagtttcctgctttctttagttttgctacgtgtacagagcagagctgatgactcgaagtggaagtcgatagacctaatttagtcagggagtccctgctaatgaatactcaccggctgtgacttggatttagaactgaactctttgaatgacttaggggtttacgggaaacggattcccggctgtcttggaagcccgactcagaatcctcaataactggtagaactggggagcagatcctgtcaggaatgtctgggagaggacaaaagaatgcagtggcttgttttattcaaacctaacatcgggcagaatttgactggagttcatttttgttttaattggcttgtatctcatccagatttaacttcttgtgctaattgtttaacaggatttagctgcttcccatgccaaagtgttagcattttttttcttttatcttttttttctttttctttttttttttttttttttttgtattgaggcaaagatagggaaaggcaaaataagtggtatttcaatgaaagttttccaggtttaagccggaaggctgcctggaaaatacttaacaagacctaaaattacaaagttactgccaaagcccattcatcagttctaagtgatatacaactgagttggctggcgctggtctgtagtcttcacttaagagaggtttatgcagctaacgaagttgaccagtgccaaaagtctccttaaagcttaaagtgtgctttatcatgcatggatttggatttatgacaggctcatccccgtggcctctcatagtgtcccgtgctagagcaaactggctcctaaccattgcccagccttggtgcatgtaggctgctggcactgaagtgggtcacacaatggaaaaaagttttacctggccacttgctgctggtgtccatttcataagacccaggcaggagcttttattaagcgtggtgatcttgcttatttttgttagtaaaaaagttggccaaaaatttcttccatatggttattatccataagtggatattagaaggcacttgaggactgttggattcccagaagtgcgcatttggtaggcaatccaggctctagaatactgatgtttcataacagtaacaatatactgtgaattgaatttttttaaatgctagtactgcataaaagttagggaagttttggtggattgcacactaacattgagtgctctggatacctgatatactgtattcactaagtcattcagcataactctgcaagtgggagaaaaagaccttttcaggactgcatgttactgtatgcccattaaagtttttgaagagctggaatggctcaaatgaagcagataggaacatgtaataatgccagtaattagactgttaactccgttccgttttggagaggggcagggattgagatgttctatgtgtatagagctgtggcattcagttttgaacagtgtggaatctatttgagtattggagatatttggggggggggtcttcacgtagttctgacctcacagttgatcttcctgtactgtgtactctctggtatactgttgcagtgtgtaacctttaatggtaagatttcaagggagatagcaacatgttgtgtttctactcactagtgtttccaccactccaggagacagcattcagagttgaccttgtgagagctggccataatttaattccatctctaggttttctgtgtaagtatcagtttatacttgtgaatttgtgttgaagcagtgctaagactttgagtgcattcacttattatctgcttattgtcagcttattgtttcagaggcacatcgagaaccaaccatgggcagctttactaaggaagagtttgactgccatatcctcgatgaaggtttcactgctaaggacattctggaccaaaaaatcaatgaagtttcttcctctgtaagtacgggaagcccacagccacaactcaaaagttccataaaagagcatgccttgccagagaatctagaatttgactgactgggctgtctagtgagtgtccatgtcagtactgctaacagggataggattttgttagggaagggggaaaaagatcttcagtgtggccaggtgcaagactgttaatgaggtccctgaacccactcactctcattccaggatgataaggatgctttctatgttgcggacctcggagacgttctaaagaagcatctgaggtggctgaaagctcttccccgtgttactcccttctatgctgtcaagtgtaatgacagcagagccatagtgagcaccctggctgccattgggacaggatttgattgtgcaagcaaggtaagactgcttatctcaccccaaaagggttatcagttgatgtgcttttgtttgtcaaactccgtctatatatactgatcttctctttcagactgaaatacagttggtgcaggggcttggggtgcctccagagaggattatctatgcaaatccttgtaagcaagtgtctcagatcaagtatgctgccagtaatggagtccagatgatgacttttgacagtgaaattgagttgatgaaagttgccagagcacatccaaaggcaaagtaagtcttctgattgagcacaaaaaggctgggcttgctaggcagactataatcttggttccttattcctatacatagtaagaaccaggctaaaccctgggttagaatcagacccacaagcagtagtgcctagacaggctgattggatgaacgtgtacagagtgcttacttggtgcatgcacttgtttctgtccacctaggttggttttgcggattgccactgatgattccaaagcagtttgtcggctcagtgttaagtttggtgccacactgaaaaccagcaggcttctcttggaacgggcaaaagagctaaatattgatgtcattggtgtcaggtgaggtctcagtgatagttacagactgagacattaaattttaaggcccttttttcctctgagaactagtcaaagaacagcatcttgtttttatttcagcttccatgtgggcagtgggtgtactgaccctgagaccttcgtgcaggcagtgtcagatgcccgctgtgtctttgacatgggagtaagtacatgactcctggaggagggctgtcttgattgaaataaccaaaccactgaatctagaatttgcctcttgtagaagctgtctgcataacagattttaaaaccatctgtcctgtgcatttaaacttgtgaatctagcaatttgacttccaaattttcttgattctagacagaagttggtttcagcatgtatctgcttgacattggtggtggctttcctgggtctgaagacacgaagcttaaatttgaggaggtaattattacaacattaacctacagacggtgagatatgtatttaccattgtggtgtttttactgattaaaggagccaacatgcctggtgttttgttctcactacttgttatttgcaactgtagcccaggctggccttgaactttcagttctcctgcctgtttcccatattttaatgtttagctcagtgcttatcactattgtactatgaagtagacagggtggaaggagttatatcttgttggcatgtattcagaattcagcatttggcccctcttgtaatccattttgtgctattttattaaatattaatataaactattcataatgtgttagaaagagatggtcctgaggggagtgggaagtggtgtatgtacagactagtttccagagaggtttgttgcttctgttgcctgatgacagacctgctatgctaggtcatgtcctgttcttacacacagcagtgtgatctttctcctcaactataacaaatggctgctcccttctctcacttagatcaccagtgtaatcaacccagctctggacaagtacttcccatcggactctggagtgagaatcatagctgagccaggcagatactacgtcgcatcagctttcacacttgcagtgaatatcattgccaaaaaaaccgtgtggaaggagcagaccggctcggacggtatgtggtggcaggatgagtgagtcatgtgggataacagttgatatgctgggtggtaattagggtgatctgtttttctagatgaagatgagtcaaacgagcaaactttgatgtattacgtgaatgatggagtgtatgggtcatttaactgcattctttatgaccatgcacatgtgaaggccctgctgcagaaggtgagttctgagcgcatgctctagcagtgagtgatgcataggatagagagaacattgggccgagagatggctcagcagttaagagcactgactgcttccagaggccctgagttcaatcccagcaacaacatggtggctcaccaccatctgtatgtaatgatgccctcttctggtgtgtctgaagaatagctacagtgtatttataatctttaaaaaaaaacaaacaaaaaacaaacattgtctttatacagagacccaagccagatgagaagtattactcatccagcatctggggaccaacatgtgatggccttgatcggatcgtcgagcgctgtagcctgcctgaaatgcatgtgggtgattggatgctgtttgagaacatgggtgcatacactgttgctgctgcttctactttcaatgggttccagaggccaaacatctactacgtaatgtcacggtcaatgtggtgagtggggctgtgcctgctcatgctcttttggttgctcagtgtaatgtttgcctactgtgagccagaagcctgggttatgcctgatgcacacacacacacatactatggggggaaggcagtatgtgctgaggggaaggatcacctgacctgtctcaaagggactgaatttgtgcttgctttttatgtttgataagttttttttttaccttgagctaaatacagaaatggagtttttccaagtaattactgctcatcttcagatatttactactaggagaggtcttacaagtaagccattagattcttttgcaactaaaatattcaagttagcatatgtgacctgtgggttccttaataatgaaattttacattggattgtttcctggtatagtgacagggtgaggtgtcaggagatctcttgggaggctgcccaatttggagggatttgggttttgaatatgccatatatgcctttgtttttcaggcaactcatgaagcaaatccagagccatggcttcccgccagaagtggaggagcaggatgttggcactctgcccatgtcttgtgcccaggagagcgggatggaccgtcaccctgcagcctgtgcttctgctagtatcaatgtatagatgccattcttgtagctcttacctgcaagtttagcttgagttcacggcatttggggggaccatttaacttaattactgctagtttggaatgtctttgtaagagtagggttggcaccaatgcagtatggaaagactaggagatgggggtcacacttactgtgttcctatggaaactttgaatattttatatggatttttattcacttttcagacctgatactaatgagtgcccctcggctgctgagcaagcatttgtagcttgtacattggcagaatgggctaaaagcttatgttgtgacccattttgaaaataaagtatcttgaaatgattggacattggagaatgtgtgcaagtatcccttacagaaggcacaaacttctgcacaggctgtgtgttacagcagtgagtctagcccagcagagatgtggatgatacaaagctgtgccccctctgtacagcatcaatgtgcttagcccatctcaagtgtttactgtgaacttggtgcccaaagtctcttaagagtgtcatctgcctagtggcctcttgacttggccacttcctaaggagagggcatctgaggctctttgaaccttgcctgcagaaaccctgactgctccctcaacccttggcctcagctgcatcaccacctagtaacagttgaagtatcgaacagcacttggcagtcaacttcctgtaataaattcaacaacagcaactactgtgttgtaaatttttaccttgacctttcatattatagtcctgctcagtttatacacctattgcatccccaaagaaatgccagactcttaacctagttagtattgaagacctgtaggtcaggaggaagggatcc

SEQ ID NO: 565 - DNA, 4964 bp, Rattus rattus (black rat)
gaattctgatctctgctctgcacacattcactgcccctctgcacaacacccatgtacatttaaaaaaaattaagaaacaaaccaaaggggttggggatttagctcagtggtagagcgcttgcctaggaagcgcaaggccctgggtttggtccccagctctgaaaaaaagaaccaaaaaaaaaaaaaaagagagagaaacaaaccaaaaaccccaaaacaaaagtgttaactgtttcaattctaaactggaggccctggtctccactcctggtttttagcagttttccctgcctgtaaaatgagagtactaacagttactgctgtagcatcttctatgggttaagagtttcactgttcttctagcagttctcagaaaaatgatcatcttctaaaggttaagagtttcactgttcttctagcagttctcagaaaaatgatccgatcactacacctaacctgcccaagtgacccaggagctacagcgggtgaatgacaggtgtggattggactagctgggaaggaccggcttcttggacctcaccaggccaacgagtgtctaaacttgaggcatccagccaggcatggcggcacacgcctttaatcccagcagttcagaggtagaatcagacagaactcagagaaagggccatcttggcctacacagcaagctccaggccagccaggagctcctgtctctaaataaacagattaaagagaaataaaaaaaatcaactttttgatttgaggagcatcgtggagggcagctaggatcagcaagtttcacagcctcttcagacagtaagtagagtacccttgtcagccagccaagcaaatgcagaaagtcaagcttcattccaaatgtctggtaccagggagcttgccccgcacctcgcagaagccacaacagtacttctttcggtggcactggtcccactggtagtctctaagcgtccctccctacaccgcacgcacttcgcccctcaaggctacaacttcctgtctagataactaggctccgcccaggcccgtaggctccgccccactcataataaaagactggattcagctccacccacgaacaactaccccggccctaggccggcctcctaggcgccaacctcaccctagcggaaagctaggccggggctccagttttgcctctaccaggctaggccccacccgtgggagaagactaggcttcgccactagcagaaggcttggatttcatcctatcccataaacacctaccccatggctctgtcctcatccgtagcagaaagctggaccatccaccgtcccagccggctggccccgttccttagcttcttctctcatacttagcagaaagatgaccccaccccattgctccggtcccgcccctagcagaaggctggactctgccctaccctacaggctccatcctgtatggctcctgcctgcatccctcatacaagtctggattctgtccagcccacaggtctggccccatccatagcaaaaaggttggactcctccccagcccaccactaggtatgcgactctagagatcgggtaccgagctcggtacccggggttcctctacaccccccctgcaggacctatcccattccatagatccgcccctcacagaactttactccgggttccagccagtagcccctaccctgagcacgctccaccctgccctcagactccatccacccaggcccaggcccagtactaggctggccaccctcccggatcaaggcccaacccttttctaatgactggaccctccctatcccagcaaggcccgccccagctaataggccccgccacccggcccagcactggactccctcggggcacacaggtcccgcccccgcctcaggctcccacccaccccagtgcaaggctaaactcctctttgcagaggcgccgccccaccccgcctcctccagcctggtggttccgcagccgtactctcctggcctggtgtgcacagcctcaccatgagttcttctgcagccagcccgcttttcgcgcctggcgaggactgcggccccgcgtggcgcgcggcccccgcggcctatgatacgtctgacacgcacctgcagatcctgggcaagccagtaatggagcgttgggagaccccctacatgcattcgctggcggctgctgctgcctccagaggtactctgcccagaagaaacggaggctactgtttaaggagtgtaggagttcccatgcatgctgcatgcctgagtttccttacctgaggcactgagctgccttggggttaccttggcagggaagggaagagtgttggcaaaatgtagacgcaggcaagagaagccggctccgaactagaacttcctctcctggggaaaaagacttctacttcccggagctgggttggagggtggatcttcggaccacagcctcgagtggagcttagagaacatggaggggcgtgggacttgtgcgggtcgggaacctccgagtttccccaggctgttgctaagaatagcttgggaaaacggagcagagaggcagctgtccggtgctatggccctgaacttctggacgaggggtggtgtctgggacaccccagcctcaaacaggtcaatagccaaagggcttcaaagttcacccggagcacatgaggacctggtatcaagtgcggaatgaaacatggaggggttacagtgtcgggcctcagaaccaggcttggccctttataaccccacatagggccatagcacaaatagcgtgggtgggcatgggctcagagtccagggatccctggggccaagcccaaaagcacgtggccagtccctcaggctcccaggctcgccgctctgattggcagctggccagggcccacactctctgtgctactttgttctgtccacccactgctggctggctgtccttgaggcatgtgtgagaccggtccaccctaaccgtccccctcccccacccatgccagctgtagtgtttttgtcctcctagggggccgggtcctggaagtgggctttgggatggccattgcagcctccagggtgcagcaggcccccataaaggaacactggattattgaatgcaacgatggggtcttccagcgtctacaaaactgggccctgaagcagccacataaggtaccttctgtcactggagtaggaggctgggagtacccccccgggactagggagatcatcgggggtaccaatgtgaccccttatatccttctcttgctcccttctcctctccaaggttgttcccttgaaaggcctgtgggaggaggaggcacctacactgcctgatggtcactttgatgtgagggcactttgggagcctggcaagggggttggcctctgggtactgattggcagcctcttgggctatcataccctccttagctcagtggagcttgccgtcaagaatgaggaccagagtttgatccccaggatgcatgtggtgtaaggagagaatgggtgctcataagttgtcccctaccccaacaaatgcacctccaatgtgcactggggacatagcctccgggaaaaggctccatgaactggctagcagaggtgctaagggcagctgggcgggctgggcagtttggcctccaaggccatgggataggtgggatgaagcttgggcaaggctgtgccagccctgactggcaggcctgtgttcacgctgcaggggattctatacgacacatatccactgtctgaagagacctggcacactcaccagttcaactttattaaggtgggactgcagggccggggaccgagggccttggacggtcaggtgggcagggtgtgatatctacagaccagcagctctctgctcatggtccctccaccccttcttgtccatgccctttctctctctctgcagactcatgctttccgtttgctgaagcctgggggtatcctcacttactgcaacctcacgtcctggggggaactcatgaagtccaagtacacagacatcactgccatgtttgaggtacgctgcctcatagcaagtgggggctccgacccaaaagccaggcagtggcccggcaagtgtggtgttgagacccatgacatgggggagaggtccagtcagggcttctctgcagcccgaacctactgctctctgcctgtggggcggtgcctgagagatgcccaccagggccatcaggacagcttcccttcagcgcatgaggcagctcttggcacagaaaactcctcttgctcgagaggcctacagcaggcctgtgcaaggatgctggtctgagacacagctgaggtcatcaggaaaactcgttgcctgcatagaattcacactcacactaggccctgtcccgcatcatcagtggtgacctgtgacccctccctacaggagactcaggtgcctgcactgctggaagctggcttccagagagaaaacatctgtacagaggtgatggcgctggtgcccccagccgactgccgctactatgccttccctcagatgatcacacccctggtcaccaagcactgagcggctggcccagggctacaaggagaatatgtcctcctcagtgcctttgtagctggagtgtgggctccagcctctccactatccctgcagtgtgacatcctaacctctgcctggtacggccatctccccagagctcaggagtaaaataaatgctaccaagactagtagtgggttggctggcggtgagccggaggtgaggcccgcatctggttcagagcctgcctctccctgcctccatagatgtggctattccatcactggtgctcagtggcccccgacccagacatgaccaatcaaccattgtatgttttcaacagtggcccaggaagagcctggggtctcaccagggtcagggtagggagagcctccacgggtcccagcccagcacacagcaagtcatgcaaccctcatggcacgaccctactctgaacatctctggtacc

SEQ ID NO: 566 - DNA, 1539 bp, Rattus norvegicus (Norway rat)
gaattccgcgctacaggcatttttgagtccaatatcttctacagtatgtctgctgctcggctctccgcggtggcacagtccaccgtgtatgccttctccgcgcgcccgctggcgggcggggagcccgtgagcctgggctccctgcggggcaaggtgctgctcattgagaatgtcgcgtccctctgaggcaccacgacccgggactacaccgaaatgaatgatctgcagaagcgtctggggcctcgtggcctggtggtgctcggtttcccgtgcaatcagttcggacatcaggagaatggcaagaatgaagagattctgaattccctcaagtatgtccgacccggtggtgggttcgagcccaactttacattgtttgagaagtgcgaggtgaatggtgagaaggctcacccgctctttaccttcctgcggaatgccttgccagcacccagtgacgatcccactgcgctcatgaccgaccccaagtacatcatttggtccccggtgtgccgcaacgacatttcctggaactttgagaagttcctggtaggtccagacggtgttccagtgcgcagatacagcaggcgctttcgcaccatcgacatcgaacccgatatagaagccctgctgtccaagcagcctagcaacccctaaggcattcctggtatctgggcttggtgatggctggctgccctccggggggaggtttttccatgacggtgtttcctctaaatttacatggagaaacacctgatttccagaaaaatcccctcagatgggcgctggtctcgtccattcccgatgcctttacgcctaaagaaaggcggtttcaccactaagaataaagtgctgcggaattccgtgtcttcctgggcacgtttttgtatgaatattcaagaaggcaccccgattactccgtgtccctgctgctgagacttgctaagaaatatgaagccacactggagaagtgctgtgctgaaggcgatcctcctgcctgctacggcacagtgcttgcagaatttcacctcttgtagaagaacctaagaacttggtcaaactaactgtgagctttacgagaagcttggagagtatggattccaaaacgcattctggtccgatacacccagaaagcaccctaggtgtcgaccccaactctcgtggaggcagcaagaaacctgggaagagtgggcaccaagtgttgtacccttcctgaagctcagagactgccctgtgtggaagactatctgtctgccatcctgaaccgtctgtgtgtgctgcatgagaagaccccagtgagcgagaaggctcaccaagtgctgtagtgggtccctggtggaaagacggccatgtttctctgctctgacagttgacgagacatatgtccccaaagagtttaaagctgagaccttcaccttccactctgatatctgcacactcccagacaaggagaagcagataaagaagcaaacggctctcgctgagctggtgaaacacaagcccaaggccacagaagatcagctgaagacggtgatgggtgacttc

SEQ ID NO: 567 - DNA, 1150 bp, Rattus norvegicus (Norway rat)
gcagcagcagcagcaccagcagcacttgggggaaaagctagaggctagagtcatggatgaccagcgcgacctcatctctaaccatgagcagctgcccatcctgggccagcgtgctagagccccagaaagcaattgcaaccgtggagtcctgtacaccagtgtctctgtcctggtggctctgctcttggctgggcaggccaccactgcttacttcctgtaccagcagcagggccgcctggacaagctgaccgtcacctcccagaacctgcaactggagaaccttcgcatgaagcttccgaaatctgccaaacctgtgagcccgatgcgcatggctactcccttgctgatgcgcccactgtccatggataacatgctccaagcgcccgtgaagaatgttaccaagtatggcaacatgacccaggaccacgtgatgcacctgcttacgaagtctggacccgtgaactacccacagctgaaggggagcttcccggagaatctgaagcaccttaagaactctatgaatggtctggactggaaggtctttgagagctggatgaaacagtggctgttgtttgaaatgagcaagaactccctggaggagaagcagcccacccagactccacctaaagagccactggacatggaagacccatcttctggcctgggagtgaccaagcaggatatgggccaaatgttcttgtgaagacagaagccagctctgcacggcggcacgtcccctgctcctcagcccttcttacactccctaacatcacacccattccgtcttcctgcacctgggcttgagactggtatctgcttcaccgtccctgacacaacaaatgaaaccggaacagaatgagaacactggagggagggccttgctgcctacccccatctaaaggacccccatttctgacccattagcagtctttaatgtggggctctgagatctaggcccactgacagggataggggatgccctacccttaatctaggctggatacatttgctgtcttctcaaggaagaggccaagccctcccagcaacccttcctcatgtcctgccgacgcccctgggatccctgctcagccaagcttgtcagcagcctgtaggaccatggttcacgtgacaataaaaggtagaaggtaaa

SEQ ID NO: 568 - DNA, 1627 bp, Rattus norvegicus (Norway rat)
cccctgaagactggataactgtcatggaggattcacagtcggatatgagcatcgagctccctctgagtcaggagacattttcatgcttatggaaacttcttcctccagatgatattctgcccaccacagcgacagggtcacctaattccatggaagatctgttcctgccccaggatgttgcagagttgttagaaggcccagaggaagccctccaagtgtcagctcctgcagcacaggaacctggaactgaggcccctgcacccgtggcccctgcttcagctacaccgtggcctctgtcatcttccgtcccttctcaaaaaacttaccaaggcaactatggcttccacctgggcttcctgcagtcagggacagccaagtctgttatgtgcacgtactcaatttccctcaataagctgttctgccagctggcgaagacatgccctgtgcagttgtgggtcacctccacacctccacctggtacccgtgtccgtgccatggccatctacaagaagtcacaacacatgactgaggtcgtgagacgctgcccccaccatgagcgttgctctgatggtgacggcctggctcctccccaacatcttatccgggtggaaggaaatccgtatgctgagtatctggacgacaggcagacttttcggcacagcgtggtggtaccgtatgagccacctgaggtcggctccgactataccactatccactacaagtacatgtgcaacagctcctgcatggggggcatgaaccgccggcccatccttaccatcatcacgctggaagactccagtgggaatcttctgggacgggacagctttgaggttcgtgtttgtgcctgtcctgggagagaccgtcggacagaggaagaaaatttccgcaaaaaagaagagcattgcccggagctgcccccagggagtgcaaagagagcactgcccaccagcacaagctcctctccccagcaaaagaaaaaaccactcgatggagaatatttcacccttaagatccgtgggcgtgagcgcttcgagatgttccgagagctgaatgaggccttggaattaaaggatgcccgtgctgccgaggagtcaggagacagcagggctcactccagctacccgaagaccaagaagggccagtctacgtcccgccataaaaaaccaatgatcaagaaagtggggcctgactcagactgacagcctctgcatcctgtccccatcaccagcctccccgtcccctcctttcttgccattttatgactttagggcttgttatgagagctgacaagacaatgctagtcccttcactgcctttttttaccttgtagatagtactcggccccctctatgcaaactggttcctggcccagattggggaatgggttggtagttgctgggtctctgctggtccagcgaaatcctatccggtcagttgttggacctggcacctacagtgaaatttcaccccaccccaccgcctgtaagattctatcttgggccctcatacgatctgtatcctccaggacccatttcctccactctgcaaagcctgtctgcatttatccatcccccacccctctccctctttttatctctttttatatatccaatttcttattttacaa

SEQ ID NO: 569 - DNA, 1215 bp, Rattus norvegicus (Norway rat)
acaagcacgttcgggagtggaggcgccagggcatccatgtgctagtgtcgacaagcaatgtcagttcactggagggggcccgtgctctcatcgctgaagccacaaagcttgggcccgttggaggtgtcttcaacctggccatggttttaagggatgccatgctggagaaccagactccagaactcttccaggatgtcaacaagcccaagtacaatggcaccctgaaccttgacagggcgacccgggaagcctgtcctgagctggactactttgtggccttctcctctgtaagctgcgggcgtggtaatgctggccaatccaactatggcttcgccaactctaccatggagcgtatttgcgaacagcgccggcacgatggcctcccaggtcttgccgtgcaatggggtgccattggtgacgtgggcattatcttggaagcgatgggtaccaatgacacagtcgttggcggcacactgccacagcgcatctcctcctgcatggaggtgctggacctcttcctgaatcagccccacgcagtcctgagcagttttgtgctggttgagaagaaagctgtggcccatggtgatggtgaagcccagagggatctggtgaaagcagtggcacacatcctaggcatccgcgacctcgcagggattaacctggacagctcgctggcagacctcggcctggactcgctcatgggtgtggaagtgcgccagatcctggaacgtgaacatgatctggtgctacccattcgtgaagtacggcaactcacactgcggaagcttcaggaaatgtcctccaaggctggctcagacactgagttggcagcccccaagtccaagaatgatacatccctgaagcaggcccagctgaatctgagtatcctgctggtgaaccctgagggccctaccttaacacgactcaactcagtgcagagctctgagcggcctctgttcctggtgcaccccattgaaggttccatcactgtgttccacagcctggctgccaagctcagtgtgcccacctacggtctgcagtgcacccaagcggcccccctggacagcattccaaacctggctgcctactacattgattgcatcaagcaggtgcagcctgaggggccccaccgagtggctgggtattcttttggagcttgtgtagccttcgagatgtgctcccagctgcaggcccagcagggcccagcccccgccc

SEQ ID NO: 570 - DNA, 591 bp, Rattus rattus (black rat)
cttttgtgagtggcagtgaacgagcacgcactgctatgaaggcgtcgggcacgcttcgggagtacaaggtggtggggcgttgcttgccaaccccaaaatgccacacaccgccactgtaccgaatgcgaatctttgcacccaaccatgtggtggccaagtcccgcttctggtactttgtgtcgcagctgaagaagatgaagaagtcatccggggaaattgtgtactgtgggcaggtgtttgagaagtcacccctgcgtgtgaagaacttcggcatctggctgcgctatgattcccgaagtggcactcacaacatgtaccgagagtaccgggacctgaccactgccggcgcggtcacacagtgctaccgagacatgggtgcccgacaccgtgcccgtgcgcactccatccagatcatgaaggtggaagagattgcagctggcaagtgccgccggccagctgtcaagcagttccacgactccaagatcaagttcccattgccccaccgtgtgttgcggcgccagcacaaaccacgcttcaccaccaagaggccaaacaccttcttctagacaccagagacccactgaataaaag

SEQ ID NO: 571 - DNA, 1353 bp, Rattus rattus (black rat)
cagcagcagcagcagcagcagcaccagcagcacttgggggaaaagctagaggctagagtcatggatgaccagcgcgacctcatctctaaccatgagcagctgcccatcctgggccagcgtgctagagccccagaaagcaattgcaaccgtggagtcctgtacaccagtgtctctgtcctggtggctctgctcttggctgggcaggccaccactgcttacttcctgtaccagcagcagggccgcctggacaagctgaccgtcacctcccagaacctgcaactggagaaccttcgcatgaagcttccgaaatctgccaaacctgtgagcccgatgcgcatggctactcccttgctgatgcgcccactgtccatggataacatgctccaagcgcccgtgaagaatgttaccaagtatggcaacatgacccaggaccacgtgatgcacctgcttacgaagtctggacccgtgaactacccacagctgaaggggagcttcccggagaatctgaagcaccttaagaactctatgaatggtctggactggaaggtctttgagagctggatgaaacagtggctgttgtttgaaatgagcaagaactccctggaggagaagcagcccacccagactccacctaaagtattgaccaagtgccaggaagaagtcagccacatccctgatgtccacccgggggcgttccgtcccaagtgtgatgagaacggtaactatatgccactccagtgccatgggagcactggctactgctggtgtgtgttccccaacggcactgaggtccctcacaccaagagccgcgggcgccataactgcagtgagccactggacatggaagacccatcttctggcctgggagtgaccaagcaggatatgggccaaatgttcttgtgaagacagaagccagctctgcacggcggcagctcccctgctcctcagcccttcttacactccctaacatcacaccccatttcccgtcttcctgcaccctggggcttgagactggtatctgcttcaccgtccctggacacaacaaatgaaaccggaacagaatgagaacactggagggagggccttgctgcctacccccatctaagggacccccatttctgacccattagcagtctttaatgtggggctctgagatctaggcccactgacagggataggggatgccctacccttaatctaggctggatacatttgctgtcttctcaaggaagaggccaagccctcccagcaacccttcctcatgtcctgccgacgcccctgggatccctgctcagccaagcttgtcagcagcctgtaggaccatggttcacgtgacaataaaaggtagaaggt

SEQ ID NO: 572 - DNA, 2681 bp, Rattus norvegicus (Norway rat)
agctaggaagataggaagtgaggtccaataccttgtgggcagtggtgtcattagctgcaacgcctaagatgtctcgagagatgggagaactcactcaaaccaggttacagaagatctggattccacacagcagcagtagcagcgtgctgcaacggcgaaggggctcctccataccacagttcactaattctcccacgatggtgatcatggtgggtttaccagctcgaggcaagacctacatctctacgaagctcacacgctatctcaactggataggaacaccaactaaagtgtttaatttaggtcagtatcgacgagaggcagtgagttacaggaactatgaattctttcgcccagacaacacagaggcccagcttatcaggaagtaagtaacagtatttaagactctgtactgccccttggctgagtggggcctgtctttatatcataagagagtggtatagagaaacccacttttccagggtgtccatacttttgacattacaacccagcatagccatctacagtattggttcttgagaattcctcagtcaagttatgaatagggaaaaatgcagaaattctcaaaaattttaaaggaagtttacagtctgtgttgggtcacatttcatagttagcctaggccatgagttgaacgcctttgtgcccagtctttctgtcagcctactcaacatctgctctagtcatagccattttctctcaagaaggttttccaggcctgtatttctggtaagcaagcataggaatatcttctcctcgcacttgagatgagtgtttcccaagcttcagtctctgtctcatcacttcagctttaaagtctcttttacctatgtgtttggaagtacttgtagatgcaacctggctctgaacctcttatctgggtcttcactacagaacccaataaccaataagaaatattttgctgaaacctaagtacattatcactgttatacctgtgcttaaaatattgcctatgccaagaattcgttttaactcaaagagcacatccatccctatgccttacccatgtacattaaccaattcagctttagctccagtagcacacagttagatccctaaaactatggtgatttcattgttcagtttttcttgggcatgtctcctcatcttcagcttctaagcatacacacagagccagtttcaactctgacccctttattagaacagagggcaccgttctagatgttcgatggataggtgaactatgtagatgttcaacagagagatgctttgtaagagaactgcagtgagaggaactgatcctgaggatagggattctctgcttctttctctgtttttcaggcagtgtgctctagcagccctaaaggatgtccataagtatctcagccgcgaggaaggtcatgttgcggtttttgatgccaccaacactaccagagaacgacgatcgttgattctacagtttgctaaggaacatggttataaggtcttctttattgagtctatttgtaatgaccccgaaatcattgcagaaaacatcaagcaagtgaaacttggtagtcctgattacatagactgtgaccaagaaaaggttttggaagactttctaaagagaatagagtgctatgagatcaactaccaacctttggatgaggaattggacagccacctgtcctacatcaagatcttcgacgtgggcacacgctacatggtaaatcgagtgcaggaccacgttcagagccgtacagcctactacctcatgaacatccatgtcacacctcgatctatctacctatgccgccatggtgagagtgaactcaaccttagaggccgcattggaggtgactctggcctctcagctcggggcaagcagtatgcctatgcactagccaacttcatccggtctcaaggcatcagctccctgaaagtatggactagccacatgaagaggaccattcagaccgctgaagccctaggtgtcccctatgaacagtggaaggccctgaatgagattgatgcgggtgtctgtgaagagatgacctatgaagaaattcaggaacactaccctgaggaatttgcactacgggaccaggataaatatcgttaccgctatcccaagggagagtcctatgaggatctggttcagcgtcttgaaccagttataatggagctagaacggcaagaaaatgtactggtgatctgtcaccaggctgtcatgcggtgcctcctggcatacttcctggataaaagttcagatgagctgccctatctcaagtgtcctctgcatactgtgctcaaactcacacctgtggcttatggctgcagagtggagtccatctacctgaatgtggaggctgtgaacacacaccgggacaagcctgagaatgtggacatcacccgtgaagctgaggaagccttggacactgtacctgcccattactgagcccttttcaagtgatcagattgtctctgttctcacccccttcctcctgtaggagctgctgcccttgttctccttaagcagactctggctatggcctgagagtgccctacctccagtgaagaagtccgtagcagctcccaaacaggtctcaattcctagccacaactaaggcacctacctagttgtggataaagttccttttaaatattctctgataaataaagatgtttatttctgc

SEQ ID NO: 573 - DNA, 1087 bp, Rattus norvegicus (Norway rat)
  misc_feature (304)..(304): n
  misc_feature (307)..(307): n
caggccagtctgggggtgaggaaaagggggtatttctctcacggctctgaggttcaggcaggcacttaaaagatatttctgacctacagctcacaacaactaccaggcccagtccgctgtccccctgcggcacgagacccacggtggggaagatgtggcggtctttgccaagggccctatggctcacctgcttcacggcgtccatgagcagaactacatcccccacgtcatggcgtatgcctcctgcattggagccaaccttgaccactgtgcctgggccagctctgcgagcagcccctccccnggngccctgctgcttccactggctctgttccccctacgcaccctgttctgagggcccaggtcccacaagagcccacaatggacagccggctcccctccctttgtggcctgccacctggccgcccacactcaacggggaggcccaggcaacctcgagcaggaacagaagtttgctacctgcctcacttccgcccggaaccctccgtgggtcggattcctggctctgccgttgtttctctattcactgccttttggccagcagggtgggtttctctcttgggccggcaggacacagactgcgcagattcccaaagcaccttatttttctaccaaatatactctccagaccctgcaaccatcatggaacattccagatctgaccttctctcccctaccccttctctctggaacactgggtcccatagtcacagccagtccctcaacccaaccctccctggagggaagaccaggtctgctcagggtgagactcccaggaagccacctccggggttggctgtctacccagggtggccaggctgggaagaacaacccagccggacaggacgcacacactccccacccagctccagagactcgccaacccttcactgaagcgactcccctgtttggaatagcaaaaaaaaaaaagaaagaaaaaaaagaaaaaaattttaatttctctttttggtgttggttaaaagggaacacaagacatttaaataaaatgttccaaatatttctgaggccagagctgagtctttgtggtcagtgggaaagagaccaa

SEQ ID NO: 574 - DNA, 1738 bp, Rattus rattus (black rat)
cggagcacagcggccgccgagcactgcgagcgagcggccggcgccacgccagcagccgcctggggccgcaggaagcaccccggggagcggcggcggcgtgtgcgtgtggcgcgggtgcgggcggcggcgcgggagcagggcagagcggcagccggttcgggcgggcggcatcatggacgagaagttgttcaccaaggagctggaccagtggatcgagcagctgaacgagtgcaagcagctctccgagtcccaggtcaagagcctctgcgagaaggctaaagaaatccttacaaaagaatctaatgttcaggaggttcgatgtccagttactgtgtgtggggatgtgcatgggcaatttcatgacctcatggaactctttagaattggtggtaaatcaccagatacaaattacttgtttatgggagactatgtggacagaggatattactcagttgaaacagttacactgcttgtagctcttaaggttcgttaccgagagcgtatcaccatactccgagggaatcacgagagcagacagatcacacaagtttatggtttctacgatgagtgtttaaggaaatacggaaatgcaaatgtttggaaatacttcacagacctttttgactaccttcctctcactgccttggtggatgggcagatcttctgtctacatggtggtctttcaccatccatagacacactggatcacatccgagcacttgatcgcctacaagaagttcctcatgagggtccaatgtgtgacttgctgtggtcagatccagatgaccgtggtggctgggggatatctcctcggggagctggttatacctttggccaagatatttctgagacatttaatcatgccaatggcctcacgttggtgtccagagctcaccagctggtgatggaaggatataactggtgccatgaccggaatgtagtaacaattttcagtgctccaaactattgctatcgttgtggtaaccaagctgcaatcatggaacttgatgacactcttaagtattctttcttgcagttcgatccagcacctcgtagaggcgagccacatgtcactcgtcgtaccccagactacttcctgtaatgaaagtttaaccttgtacagtattgccatgaacaccgtctgttgacctaatggaatcggaagagcagcagtaactccaaagtgtcagaaatagttaacattcaaacttgtttccacacggaccaaaagatgtgccatataaaatacaaagcctcttgtcatcaacagccgtgaccactttagaatgaaccagttcattgcatgctgacgcgacattgttggtcaagaatccagtttctggcatagcgctatttgtagttacttttgctttcttgagagactgcagatctaggatgtaacattaacacctgtgagtccagttgacttccacttagctgtagcttactcagcatgactgtagagaggatagcaaacaatcattggagcttaatgaacatttttaaatgagtaccaaggcctcccctcttgttgtgttctttcagggatactattaatttaattgtatgatttctctgcactcagtttctcccttctcaaatctcggcccgcgttgttctttgttactgtcagaaaacctggtgagttgtttgaacagaactgtctcctcctgtaagatgatgtactgccaagtacgcagtgtttcataataaacttgagactgagaagtcagggttt

SEQ ID NO: 575 - DNA, 1580 bp, Rattus rattus (black rat)
tgcaggtcggcggcgggggaggcggcgggggacggctcgccgccatggacgacaaggcgttcaccaaggagctggaccagtgggtggagcagctgaacgagtgtaagcagctgaacgagaaccaagtgcggacgctgtgcgagaaggctaaggaaattttaacaaaagaatcaaatgtacaagaggttcgctgtcctgttaccgtctgtggagatgtgcatggccaattccatgaccttatggaactcttcagaattggtggaaaatcaccagacaccaactatctattcatgggtgactatgtagacagaggatattattctgtggagaccgtgactcttcttgtagcattaaaggtgcgctatccagagcgtatcacaatattgcgaggaaatcatgaaagccggcagatcacacaagtatatggcttttatgatgaatgcctacgaaagtatgggaacgccaacgtgtggaaatactttacagatctctttgattatcttccacttacagctttagtagatggacagatattctgcctccacggtggcctctctccatccatagatacactggatcacataagagccctggatcgcttacaggaagttccacatgagggcccaatgtgtgatctcttatggtcagatccagatgaccgtggtggctggggcatttctccacgtggtgctggctacacatttggacaagacatttctgaaacatttaaccatgccaacggcctcacactggtgtcccgtgctcaccagcttgtaatggaaggatataattggtgccatgatcggaatgtggtcaccatttttagtgcacccaattactgctaccgctgtgggaaccaggctgctatcatggaattagacgacactttaaaatactcttttcttcagtttgacccagcacctcgtcgtggagagcctcatgtgacccggcgcaccccagactacttcctataaattcctccccaggacctgtctttgtatgttgaagtatacctggctttttaaaaaatatatatacatatatatatttaaaaacaacagttatctgtgtgtctctgtaacaaattgtgctatgtcttgacgttaaaacacatcatggaccaaaacgtgccatactaatggtgagccatcagcacggtgtgaacttgagtccactgtcctagccacgagtcaaccaggcagccgcctgcccgcctgcctgctgtagtagccgtccttcgtgactggttaagggaaagggtcactggtggcttcatcttccttcgcgcttacttggaaatttagttacagtttaactggcatggattatagagttggagttttatttttaagaattgacaagctgacttccacttaaattcataaccctttattttgttgaaatgtatgactaactgaagaagagattcttgggagtatgttgtcataacactaagatttcctttcaagtttcctgaactgaattactgttggatgttgacctgcacattctgtatatttgtcctgacagtgttgcatcctccttgctgtactgaacaataaacttcccaatttagagag

SEQ ID NO: 576 - DNA, 1981 bp, Rattus norvegicus (Norway rat)
caacgcggttctgttggtgttcaggttccctactgacttcccttccagtggcagcggcggaggcggcagtggcagcggcaagcactgagcacgtttgggtagttgtccaagatgccgaatatcaaaatcttcagcgggagctcccaccaggacttatcccagaaaattgctgaccgcctgggcctggagctaggcaaggtggtgactaagaaattcagcaaccaggagacctgtgtggaaattggggagagtgttcgtggagaggatgtctacattgttcagagtggctgcggtgagataaatgacaatctaatggagcttttgatcatgatcaatgcttgcaagatcgcttctgccagccgggttactgcggtcatcccatgcttcccttatgcccggcaggataagaaggataagagccgggctccaatctcagctaagcttgttgcaaatatgctatctgtagcaggtgcggatcatattatcaccatggatctacatgcatctcagattcagggcttctttgatatcccagtggacaatttatacgcagagccagctgtcctgaagtggattcgggagaacatatctgagtggagaaactgtactattgtctcacctgacgctggcggagccaagagagtgacctccattgcagaccgattgaatgtggattttgctttgattcacaaagaacggaagaaggccaatgaagtggaccgcatggtactagtaggagatgtgaaggatcgtgtggctatacttgtggatgacatggctgacacttgtggtacaatttgtcatgctgctgacaaacttctctcagctggagctaccagagtttatgccattttgacgcatgggatcttttctggtccagccatttctcgcatcaacaatgcatgctttgaagcagtagtagttaccaataccatacctcaggaggacaagatgaaacactgctccaaaatccaggtgatcgacatctctatgatccttgcagaagccatcaggagaacccacaatggagaatctgtctcctacctgttcagccatgttcctctataatatcataaattctgaagcgttttcaaaatgaaaccacccccaccccttgtttttcttgtatttggtgagttgggcagaagagccagcttgcttcagtgtagctttttacagcccacattagctacattaggatttatcctaattggagaaagacagactgctattaactgctaggacaccctacgtgcattgttgcagcctggctttcttgtttattttgtgatccttgcagctttaaattgagttccactgttgaaagctgcatagactgttaaaagagagagtattccccaaggtccttaggatggaattgtggagctcatactccattgcatgtgaaggctttggagtttccttcattcagaataactagcgacaaagccagccctcgtgtgatacattttcagaggtgtatgctacactgcagcaagttccctgtgcatccttaaacagagttcgcctgctgagcaccctgtacggcaggggcgggtagctcaatgcagtaatcaatttttgggaggaagaagcctgatctattatcatctgtttaattctctgtagcttggattctctatgcctattcctttcctgttggcttcaccttcagctatctcgaccctttcctggacaaatatcttgaactcagtgatcattgtttgtgacaaaattttctgtaagacagacttgcttcttgctatgtaactgctaacgttgacattaggtaacttgctatagcacaatcttccttagcccgctctctctgagttagtgggttttaggtggtgtgtgtgtcgtagtgccttttgattaatttaagtatttaatttttatcttccttcgatctgtttggcttaacaatttgatcttattgtctcatgtagaagaaacttaataaaatgtctgtcatgtgtac

SEQ ID NO: 577 - DNA, 3105 bp, Rattus sp.
aaattaaatctaaggactttcagatttatggctttgatcacactgtttctagagaaatctaaacctggaaggctgagttaagccagacattccagatggctctctcctcatagtccttggaatcacgaaggaagcagggcagagagctaccagaagtagtaaacattgatcacaggctcctagttcatcgtgaccaaatcaaaaggaatgtttctccatggcccattaactgtctgttagtttgaacgtaacatggtgatagccagactggagctacctgagtcctgttccagggaatcttagggcaattacctacataacccttctggacctcaactgcctgatcttagggattaataacatctatttaccagagcgactgcattgtgaagggttccaaacactcctggcacagagtaagcactgtctgggctttggatagaaatctcttctgcaccatgagctcatttataagactttccaggtctggaattgtacaacccaaacagctcatatcaatgtcacaagctcttcggtttggcaaaatgtctgggagtcaccaaatgcagagaatgccatattcaacaaagcctgataaccaaggactcagtggactaattggcagtcctatcccagatccaaggttccttgagccaggggcaagctaggatatgctcccaggtatcttctcccttaggactttaggtttcttggccacttcctcttatttcagtgaaagcagatccactccattgacacttgtggtcacagtctagcacgactgctcccttccttcttttctccctccctgcgcagcttcatttgctcccagtagtggctggaaaaacaccaaattccaatccgcggtttctcccttctacttcctggaaacatccaagggctcggcacttactcagcagattcaaaccttccactttccatcactcatcgaggatgatgctgctccttggcaccaaccaccctgcctgactccaccctctggcttacaataaaaggctgaggcagagccgctagaaatgcagagacacagacagaggccagcccagaaaccagccaactctcactgaagccagatctctcttcctccaccactatgcaggtctctgtcacgcttctgggcctgttgttcacagttgctgcctgtagcatccacgtgctgtctcagccaggtgagaccccagtttccttctccttctagcatttcaccccattttttaattgttgtgggccatcatagtgggccttacctagtaaaatacttttttttttttaccaaggtaaggagcatagagccaacccaattacaggggttgcttctggaaagcaactaggattttaatcgttagatcaaagtttagaatcgcaccttcatacagttcctgctcccctatttcctgagtatttgagaacctggttgatcaaagaagggcttgggttggttcatttttccagatagaggagaatcaggaagagacccaggatcttgatctatgtttcaccagcttccagagatagcagctcagcagaggtagttggtatcagagatactcatgattcgatatagggtttttttttgtaacctatagtaatgtactcggtaatcttctcagaccctagtaatttgacttctaactaccctcaaatgacagtccctagctttaatggcatccctctgtccaagattgtgaacttactttaagtgtgtcagagatcaccttccagctctgatgtattggcatttacatcccaatctgctgaaactgccttctcctcatggtccttttcttctctaaggtcagaagcacctttccagttctaatgtgctccctgcttctcttttattctccagatgcagttaatgccccactcacctgctgctactcattcactggcaagatgatcccaatgagtcggctggagaactacaagagaatcaccagcagcaggtgtcccaaagaagctgtagtgtgagttatacaccccagccctccctggtccaatatttttcctcgagaacaagggatggtcttcatagacttagaatcagttacatgctcagctccaatatcaagtggttcccaatggggaaactgaggccaagaagggaaagttaattctcagcagcactgtctctatggctgctgttcggggccttccatttgcatgagcttattgtagtaaacttgcagaagaggaaggtcactttgagtccccctttctacctgccctcccacctcgagccctacacagtccctccatgtatagcaggttaaacttcatctaaccgtgtcttctctctttccacagatttgtcaccaagctcaagagagagatctgtgctgaccccaataaggaatgggtccagaagtacattagaaaactggaccagaaccaagtgagatcagaaactacagtcttctataaaattgcatcaaccctaaggacttcagcacctttgaatgtgaacttgacccataaatctgaagctaatgcatccactctcttttccacaaccacctcaagcacttctgtagaagtgaccagtatgacagagaactagtgtgatttggaatgtgatgccttaagtaatgttaaacttatttaacttattgatattacactattcccttccatgaatactagaaatccttaaatgcaagatgtagatccatttttttatttctctgtgaatcctggttcaacactttcaatgtatgagagatgaatgggtaaactttgtgtttgagagtccaaggtattgtttaaaatattattatggatattcctaattattaaaagaaatatattatttttgtacacaagtctgactttcggtgttttctgagggaaatggcaaagctaagagtacataagaacacacaggaggacatcacaagatgggacacatattgagggggggatgggggaatgaatgctgcactcttttgtattgagtggtctcatgtgagtgtcataaactctttgagacagggtccagtcagggatgctagtaccatagttccaatccccaggactgcttctcagacacatgctcgataaaagccccagtccttcccagtcatg

SEQ ID NO: 578 - DNA, 466 bp, Rattus norvegicus (Norway rat)
ctttccgtctccggccgccgcaggagaggagtcgccgccatgtccgcgcatctgcaatggatggtcgttcggaactgctccagtttcttgatcaagaggaataagcagacgtacagcacggagcccaataatctgaaggcccgaaactccttccgctacaacgggctaattcaccgcaagacggtcggagtggaggcctggcctgatggcaaaggggtcgtggtggttatgaaacgcagatccggtcagcgaaaacctgccacttcctacgtgaggaccaccatcaacaagaatgctcgggctaccctcagcagcatcaggcacatgatccgaaagaacaagtaccgccctgatctgcgtatggcggccatccgcagagccagtgccatccttcgaagccagaagcctgtggtggtgaagaggaaacggacccgccccaccaagagctcctgagccccacaccccg

SEQ ID NO: 579 - DNA, 1880 bp, Rattus rattus (black rat)
gggggggggggctgccgatcgcaatggaagaagaaatcgccgccctcgtcattgacaatggctccggcatgtgcaaagctggctttgctggggacgacgcccccagggccgtgtttccttccatcgtcgggcgcccccgacaccagggtgtcatggtgggcatgggccagaaagactcgtacgtgggtgatgaggcccagagcaagaggggtattctgaccctgaagtaccctattgagcacggcattgtcaccaactgggacgacatggagaagatctggcaccacaccttctacaacgagctgcgtgtggcccctgaggagcacccggtgcttctgaccgaggcccccctgaaccccaaagctaacagagagaagatgacgcagataatgtttgaaaccttcaataccccagccatgtacgtggccattcaggcggtgctctccttgtatgcatctgggcgtaccactggcattgtcatggactctggtgacggggtcacacacacagtgcccatctatgagggctacgcccttccccacgccatcttgcgtctggacctggctggccgggacctgacagactacctcatgaagatcctgactgaaaggggctacagctttaccaccactgctgagagggaaattgttcgtgacataaaggagaagctgtgctatgttgccctggattttgagcaagaaatggctactgctgcatcatcttcctctttggagaagagttatgagctgcctgatgggcaggtgatcaccattggcaatgagcgcttccggtgtccagaggctctcttccagccttccttcctgggcatggagtcctgtggcatccacgagaccaccttcaactccatcatgaagtgtgatgtggacatccgcaaagacctgtatgccaacacagtgctgtctggtggtaccaccatgtatccaggcattgctgacaggatgcagaaggagatcacagccctggctcccagcacaatgaagattaagatcattgctcctcctgaacgcaagtactcagtctggattggcggctccatcctggcctcactgtccaccttccagcagatgtggatcagcaagcaggagtatgacgagtcaggcccctccattgtccaccgcaaatgcttctagatggactgagcaggtgccaggcatctgctgcatgagctgattctgaagtatcgatttgccctggcaaatgtacacacctcatgctagcctcatgaaactggaataagcctttgaaaagaaatttgtccttgaagcttgtatctgatatcagcactggatcgtagaacttgttgctgatttttgaccttgtattcaagttaactgttcccttggtatatgtttaataccctgtgcatatcttgatttagtccttagttcatgtggctcggtcacttggtggctggggagatctgtggaaaagtcagtcagtccccagcctagtggatctctgtgagcaccatgtagtgatctgtgcagggtattaaccaacagcagacttccaggatttcccgaggctggcaagggttcctgaactagttaccacttcttttcttgccagtctaacagggtgggaaagtccgagccttaggacccagtttctgttctggttttttccctcctgacctccatgggttgttacttgccttgagttgggaacgtttgcatcgacacctgtaaatgtattcatccttttaatttatgtaaggtttttgtactcaattctttaagaaatgacaaattttggttttctactgttcagtgagaacattaggccccagcaacacgtcattgtgtaaagagaaataaaagtgctgcagtaaaaaaaaaaaaaaaccccccccccccccc

SEQ ID NO: 580 - DNA, 6335 bp, Rattus norvegicus (Norway rat)
ggatcccggcccgcagcagctctctgctcccagaacccgtgagaaagagacctcaccgcctggtcaggtgggcactcctgaggctgcagagcggaagagaccaccaacactgcccacccctgcccacatccctggcccaagaggaaactgtataaggcctctgggttccgtgggggagggcccaggagcgtcaggacccctgcctgagacaccgccggaacctgagggaaacagaccggataaacagttctctgcacccaaatcccatgggagggagagctgaaccttcagagaggcagacaagccttggaaaccagaagagactgctctctgtacatacatctcggacgccagaggaaaacaccaaaggccatctggaaccctggtgcactgaagctcctggaaggggcggcacaggtcttcctggttgctgccgccacagagagcccttgggcagcaccccgcctggtgaactcaagacacaggcccacaggaacagctgaagacctgcagagaggaaaaactacacgcccgaaagcagaacactctgtccccataacggactgaaagagaggaaaacaggtctacagcactcctgacacacaggcttataggacagtctaaccactgtcagaaatagcagaacaaagtaacactagagataatctgatggtgagaggcaagcgcaggaacccaagcaacagaaaccaagactacatggcatcatcggagcccaattctcccaccaaaacaaacatggaatatccaaacacaccagaaaagcaagatctagtttcaaaatcatatttgatcatgatgctggaggacttcaagaaagacgtgaagaactcccttagagaacaagtagaagcctacagagaggaatcgcaaaaatccctgaaagaattccaggaaaacacaatcaaacagttgaaggaattaaaaatggaaatagaagcaatcaagaaagaacacatggaaacaaccctggatatagaaaaccaaaggaagagacaaggagccgtagatacaagcatcaccaacagaatacaagagatggaagagagaatctcaagagcagaagattccatagaaatcattgactcaactgtcaaagataatgtaaagcggaaaaagctactggtccaaaacatacaggaaatccaggactcaatgagaagatcaaacctaaggataataggtatagaagagagtgaagactcccagctcaaaggaccagtaaatgtcttcaacaaaatcatagaagaaaacttccctaacctaaaaaaagagatacccataggcatacaagaagcctacagaactccaaatagattggaccagaaaagaaacacctcccgtcacataatagtcaaaacaccaaacgcacaaaataaagaaagaatattaaaagcagtaagggaaaaaggtcaagtaacatataaaggcagacctatcagaatcacaccagacttctcgccagaaactatgaaggccagaagatcctggacagatgtcatacagaccctaagagaacacaaatgccagcccaggttactgtatcctgcaaaactctcaattaacatagatggagaaaccaagatattccatgacaaaaccaaatttacacaatatctttctacaaatccagcactacaaaggataataaatggtaaagcccaacataaggaggcaagctataccctagaagaagcaagaaactaatcgtcttggcaacaaaacaaagcgaatgaaagcacacaaacataacctcacatccaaatatgaatataacgggaagcaataatcactattccttaatatctctcaacataaatggccttaactccccaataaaaagacatagattaacaaactggatacgcaacgaggaccctgcattctgctgcctacaggaaacacacctcagagacaaagacagacattacctcagagtgaaaggctggaaaacaattttccaagcaaatggtcagaagaagcaagctggagtagccattctaatatcaaataaaatcaatttttaactaaaagtcatcaaaaaagataaggaaggacacttcatattcatcaaaggaaaaatccaccaagatgaactctcaatcctaaatatctatgccccaaatacaagggcacctacatatgtaaaagaaaccttactaaagctcaaaacacacattgcacctcacacaataatagtgggagatttcaacaccccactctcatcaatggacagatcatggaaacagaaattaaacagagatgtagacagactaagagaagtcatgagccaaagggacttaacggatatttatagaacattctatcctaaagcaaaaggatataccttcttctcagctcctcatggtactttctccaaaattgaccatataattggtcaaaaaacgggcctcaacaggtacagaaagatagaaataatcccatgcatgctatcggaccaccacggcctaaaactggtcttcaataacaatcaaggaagaatgcccatatatacttggaaactgaacaatgctctactcaatgataacctggtcaaggaagaaataaagaaagaaattaaaaactttttagaatttaatgaaaatgaaggtacaacatacccaaacttatgggacacaatgaaagctgtgctaagaggaaaactcatagcgctgagtgcctgcagaaagaaacaggaaagagcatatgtcagcagcttgacagcacacctaaaagctctagaacaaaaagaagcaaatacacccaggaggagtagaaggcaggaaataatcaaactcagagctgaaatcaaccaagtagaaacaaaaggaccatagaaagaatcaacagaaccaaaagttggttctttgagaaaatcaacaagatagataaacccttagccagactaatgagaggacacagagagtgtgtccaaattaacaaaatcagaaatgaaaagggagacataacaacagattcagaggaaattcaaaaaatcatcagatcttactataaaaacctatattcaacaaaacttgaaaatcttcaggaaatggacaattttctagacagataccaggtaccgaagttaaatcaggaacagataaaccagttaaacaaccccataactcctaaggaaatagaagcagtcattaaaggtctcccaaccaaaaagagcccaggtccagacgggtttagtgcagaattctatcaaaccttcatagaagacctcataccaatattatccaaactattccacaaaattgaaacagatggatcactaccgaataccttctacgaagccacaattactcttatacctaaaccacacaaagacacaacaaagaaagagaacttcagaccaatttcccttatgaatatcgacgcaaaaatactcaacaaaattctggcaaaccgaatccaagagcacatcaaaacaatcatccaccatgaccaagtaggcttcatcccaggcatgcagggatggtttaatatacggaaaaccatcaacgtgatccattatataaacaaactgaaagaacaaaaccacatgatcatttcattagacgctgagaaagcatttgacaaaattcaacaccccttcatgataaaagtcctggaaagaattggaattcaaggcccatacctgaacatagtaaaagccatatacagcaaaccagttgctaacattaaactaaatggagagaaacttgaagcaatcccactaaaatcagggactagacaaggctgcccactctctccctacttattcaatatagttcttgaagttctggccagagcaatcagacaacaaaaggaggtcaaggggatacagatcggaaaagaagaagtcaaaatatcactatttgcagatgatatgatagtatatttaagtgatcccaaacattccaccagagaactactaaagctgatagacaacttcagcaaagtggctaggtataaaattaactcaaataaatcagttgccttcctctatacaaaagagaaacaagccgagaaagaaattagggaaacgacacccttcataatagacccaaataatataaagtacctcggtgtgactttaacaaagcaagtaaaagatctgtacaataagaacttcaagacactgaagaaggaaattgaagaagacctcagaagatggaaagatctcccgtgctcatggattggcaggattaatatagtaaaaatggccattttaccaaaagcaatctacagattcaatgcaatccccatcaaaataccaatccaattcttcaaagagttagacagaacaatttgcaaattcatctggaataacaaaaaacccaggatagctaaagctatcctcaacaataaaaggacttcagggggaatcactatccctgaactcaagcagtattacagagcaatagtgataaaaactgcatggtattggtacagagacagacagatagaccaatggaatagaattgaagacccagaaatgaacccacacacctatggtcacttgatttttgacaaaggagccaaaaccatcaaatggaaaaaagatagcattttcagcaaatggtgctagttcaactggaggtcaacatgtagaagaatgaagatcgatccatgcttgtcaccctgtacaagcttaagtccaagtggatcaaggacctccacatcaaaccagacacactcaaactaatagaagaaaaactagggaagcatctggaacacatgggcactggaaaaaatttcctaaacaaaacaccatggcttacgctctaagatcaagaatcgacaaatgggatctcataaaactgcaaagcttctgtaaggcaaaggacactgtggttaggacaaaacggcaaccaacagattgggaaaatatctttaccaatcctacaacagatagaggccttatatccaaaatatacaaagaactcaagaagttagaccgcagggaaacaaataaccctattaaaaaatggggttcagagctaaacaaagaattcacagctgaggaatgccaaatggctgagaaacacctaaagaaatgttcaacatctttagtcataagggaaatgcaaatcaaaacaaccgtgagatttcacctcacaccagtgagaatggctatgatcaaaaactcaggggacaacagatgctggcgaggatgtggagaaagaggaacactcctccattgttggtgggattgcaaactggtacaaccattctggaaatcagtctggaggttcctcagaaaattggacattgaactgcctgaggatccagctatacctctcttgggcatatacccaaaagatgccccaacatataaaaaagacacgtgctccactatgttcattgcagccttatttataatagccagaagctggaaagaacccagatgcccttcaacagaggaatggatacagaaaatgtggtacatctacacaatggaatattactcagctatcaaaaacaacgagtttatgaaattcgtaggcaaatggttggaactggaaaatatcatcctgagtaagctaacccaatcacagaaagacatacatggtatgcactcattgataagtggctattagcccaaatgcttgaattaccctagatacctagaacaaatgaaactcaagacggatgatcaaaatgtgaatgcttcactccttctttaaaaggggaacaagaatacccttggcagggaagagagaggcaaagattaaaacagagaatgaaggaacacccattcagagcctgccccacatgtggcccatacatatacagccacccaattagacaagatggatgaagcaaagaagtgcagaccgacaggagccggatgtagatcgctcctgagagacacagccagaatacagcaaatacagaggcgaatgccagcagcaaaccactgaactgagaataggacccccgttgaaggaatcagagaaagaactggaagatcttgaaggggctcgagaccccatatgtacaacaatgctaagcaaccagagcttccagggactaagccactacctaaagactatacatggactgaccctggactctgacctcataggtagcaatgaatatcctagtaagagcaccagtggaaggagaagccctgggtcctgctaagactgaacccccagtgaactagactggtggggggagggcggcaatggggggagggttgggaggggaacaccataaggaaggggaggggggagggggatgtttgcccggataccgaaagggaataacatcgaaatgtatataagaatactcaagttaataaaaaaaaaaaaaaaaaaaga

SEQ ID NO: 581 - DNA, 2326 bp, Rattus norvegicus (Norway rat)
ctcagccagacagtcctcacctgcaacaggtggcctcaggagtcaggaacatctctacttccccaacgacccctgggttgtcctctcagagatggctatggatactacaaggtgtggagcccagttgttgactctggtcgagcagatcctggcagagttccagctgcaggaggaagacctgaagaaggtgatgagccggatgcagaaggagatggaccgtggcctgaggctggagacccacgaggaggccagtgtaaagatgttacccacctacgtgcgttccaccccagaaggctcagaagtcggagactttctctccttagacctgggaggaaccaacttcagagtgatgctggtcaaagtgggagagggggaggcagggcagtggagcgtgaagacaaaacaccagatgtactccatccccgaggacgccatgacgggcactgccgagatgctctttgactacatctctgaatgcatctctgacttccttgacaagcatcagatgaagcacaagaaactgcccctgggcttcaccttctccttccctgtgaggcacgaagacctagacaagggcatcctcctcaattggaccaagggcttcaaggcctctggagcagaagggaacaacatcgtaggacttctccgagatgctatcaagaggagaggggactttgagatggatgtggtggcaatggtgaacgacacagtggccacaatgatctcctgctactatgaagaccgccaatgtgaggtcggcatgattgtgggcactggctgcaatgcctgctacatggaggaaatgcagaatgtggagctggtggaaggggatgagggacgcatgtgcgtcaacacggagtggggcgccttcggggactcgggcgagctggatgagttcctactggagtatgaccggatggtggatgaaagctcagcgaaccccggtcagcagctgtacgagaagatcatcggtgggaagtatatgggcgagctggtacgacttgtgctgcttaagctggtggacgagaaccttctgttccacggagaggcctcggagcagctgcgcacgcgtggtgcttttgagacccgtttcgtgtcacaagtggagagcgactccggggaccgaaagcagatccacaacatcctaagcactctggggcttcgaccctctgtcaccgactgcgacattgtgcgccgtgcctgtgaaagcgtgtccactcgcgccgcccatatgtgctccgcaggactagctggggtcataaatcgcatgcgcgaaagccgcagtgaggacgtgatgcgcatcactgtgggcgtggatggctccgtgtacaagctgcacccgagcttcaaggagcggtttcacgccagtgtgcgcaggctgacacccaactgcgaaatcaccttcatcgaatcagaggagggcagcggcaggggagccgcgctggtctctgcggtggcctgcaagaaggcttgcatgctggcccagtgaaatccaggtcatatggaccgggacctgggttccacggggactccacacaccacaaatgctcccagcccaccggggcaggagacctattctgctgctacccctggaaaatggggagaggcccctgcaagccgagtcggccagtgggacagccctagggctctcagcctggggcagggggctgggaggaagaagaggatcagaggcgccaaggcctttcttgctagaatcaactacagaaaatggcggaaaatactcaggacttgcactttcacgattcttgcttcccaagcgtgggtctggcctcccaagggaatgcttcctggaccttgcaatggcctggcttccctgggggggacacaccttcatggggaggtaacttcagcagttcggccagaccagaccccaggagagtaagggctgctagtcacccagacctggctgttttcttgtctgtggctgaagaggccggggagccatgagagactgactatccggctacatggagaggactttccaggcatgaacatgccagagactgttgccttcatatacctccacccgagtggcttacagttctgggatgaaccctcccaggagatgccagaggttagagccccagagtccttgctctaaggggaccagaaaggggaggcctcactctgcactattcaagcaggaatcatctccaacactcaggtccctgacccaggaggaagaagccaccctcagtgtccctccaagagaccacccaggtccttctctccctcgttcccaaatgccagcctctctacctgggactgtgggggagtttttaattaaatatttaaaactacttca

SEQ ID NO: 582 - DNA, 1159 bp, Rattus norvegicus (Norway rat)
  misc_feature (427)..(427): n
  misc_feature (429)..(429): n
  misc_feature (430)..(430): n
  misc_feature (431)..(431): n
  misc_feature (442)..(442): n
  misc_feature (443)..(443): n
  misc_feature (444)..(444): n
  misc_feature (445)..(445): n
  misc_feature (446)..(446): n
  misc_feature (453)..(453): n
  misc_feature (454)..(454): n
  misc_feature (455)..(455): n
ccgattaggtccccaaaacgggggacgtccatggggatgaacatgatttccaagggtacggagaaagcacttctgaagcttcaagagttctttcctgagctgcagattctggcggtcagtggtaactattgcaccgacaagaaacctgctgccataaactggatcgaagggagaggaaagactgtggtttgtgaagctgtcattccagccaaggtggtgagagaagtattaaagagcactacggaagctatggttgacgtaaacattaataagaatcttgtgggctctgccatggctggtagcataggaggctacaacgcccatgctgccaacatcgtcactgccatctacattgcatgtgcccaggatgcagcacagaatgtggggagttcaaactgtattactttaatggaagcaagtggtcccncnnntgaagacttgnnnnncagctgnnncatgccgtctatagagatcggaaccgtgggtggtgggaccaaccttctacctcagcaagcctgcctgcagatgctaggtgttcaaggggcgtgcaaagacaatcctggagaaaatgcacggcagcttgcccgaattgtgtgtggcactgtaatggctggtgagttgtccttgatggcagcattggcagcaggacatcttgtcagaagtcacatggttcacaacagatcaaagataaatttacaagatctgcagggaacatgcaccaagaaggcagcttgagcatcctgacatacttgaactgaaacacgggcattgggttctcaaggtctaacatgaaatctgtgaattaaaaatgtcagtgcagtgtcttgtggaagatgaacgtgatcagtgagcctgcttggtttctggctctttcagagacgtctgcggtcctttgcaccagactcctcagacgtgggaactatggttctttccgtgccgtattctagaaagatctcatgtggatgtcatggtgctctgagcaccacagatgtgactgcagctcgtttctaaaagctgccacaagctggaagctggtgttttgacgaaatgatggatcttggtgatcagtgtggggctcacctccaatgggttaaaatggagttttaaatgacactgtagctgacagaactctcgatttttatttattcagtctgggcgg

SEQ ID NO: 583 - DNA, 922 bp, Rattus rattus (black rat)
tctttttcttcgggaaaacaccaaatggcggatgacgccggtgcagcgggagggcccggaggacccgggggcccaggattaggaggccgcggcggcttccgcggaggattcggcagcggccttaggggccgcggtcgtggccgaggccgtggccgcggtcgaggccgcggggctcgtggaggtaaagctgaagacaaggagtggatccccgttaccaagctgggccgcctggttaaggacatgaagatcaagtccttggaggagatctacctgttctccctgcccattaaggagtctgagattattgactttttcctgggtgcatctctaaaggatgaagttctgaaaatcatgccagtgcagaagcagactcgggctggccagcggaccaggttcaaggcctttgtcgctattggggactacaatggccacgttggtcttggtgttaagtgctccaaggaggtagccactgccatccgaggggccatcatcctggccaagctttcgatcgtcccagtgcggagaggctactgggggaacaagattggcaagccccacactgtgccatgcaaggtgacaggccgctgtggctctgtgctggttcgtctcatccctgcccccagaggcactggcattgtctctgctcctgtgcccaagaagctactgatgatggccggtatagatgactgctacacttcagccaggggctgcactgccaccctgggcaactttgccaaggccacctttgatgccatctccaagacctacagctacctgacccctgacctctggaaagagactgtgttcaccaagtctccttatcaggaattcactgaccatcttgtgaaaacccacaccagagtctctgttcagaggacccaggctccagctgtggctaccacataagggtttttatacaaga

SEQ ID NO: 584 - DNA, 2674 bp, Rattus norvegicus (Norway rat)
  misc_feature (2397)..(2397): n
cgcggagagttccaggctgggaccggactctggacagcgcacgctcgatggctgcgcacgcctggccgacggccgccttgctgctgctgctggtggactggctgctgctgcggcccgtgctcccgggaatcttctccctgttggttcccgaggtgccactgctccgggtctgggccgtgggcctgagtcgctgggctatcctgggactaggggtccgcggggtcctcggggtcaccgcgggagcccgtggctggctggctgctttgcagccgctggtggcggcgctgggtttggccctgcctggacttgcctcgttccgaaagctgtccgcctggggagcactccgggagggtgacaacgctggactgctccactggaacagtcgcttagatgccttcgttctcagttatgtggccgcattgcccgcagctgccctgtggcacaagttggggggcttctgggcgcccagtggccacaagggcgctggagacatgctgtgtcggatgctaggcttcctggactccaagaaggggcgtctccacctggttctggttctcttgatcctctcctgccttggggaaatggccattcccttcttcacaggccgcatcactgactggatccttcaggataagacagcccccagcttcgcccgcaacatgtggctcatgtgtattcttaccatagccagtacagtgctggagtttgcaggagatggaatctacaacatcaccatgggccacatgcacagccgcgtgcatggagaggtgtttcgggccgtccttcaccaggagacaggatttttcctgaagaacccaacaggttccatcacatctcgggtgactgaggacacctccaacgtgtgcgagtccattagtgacaagctgaacctgttcctgtggtacctggggcgaggcctgtgtctcctggcgttcatgatttgggggtcattctacctcactgtggtcaccctgctcagcctgcctctgcttttccttctgcccaggaggctggggaaagtgtaccagtcactggcagtgaaggtgcaggagtctctagcaaagtccacgcaggtggccctcgaggccctgtcggcgatgcctaccgtacggagctttgccaacgaggagggagaggcccagaagtttaggcagaagttggaagaaatgaagccgctaaacaagaaagaggccttggcttacgtcactgaagtctggaccatgagtgtctcgggaatgctgctgaaggtgggaattctgtacctcggtgggcagctggtggtcagaggggctgtcagcagcggcaacctcgtctcctttgttctctaccagcttcagttcaccagggccgtggaggtcctgctctccatctatccctccatgcagaagtccgtgggcgcttcggagaaaatattcgaatacctggaccggactccctgctctccgctcagtggctcactggcacctttaaacatgaaaggcctcgtcaagttccaagatgtctcctttgcctacccaaaccatcccaacgtccaggtgcttcaggggctgacttttacgctgtatcccgggaaggtgaccgccttggtgggacccaatgggtcagggaagagcaccgtggccgccctgctgcagaacctgtaccagcccaccgggggcaaggtgctcctggatggcgagcccctggtccagtatgatcaccactacctgcacacgcaggtggccgcagtgggacaagagccactgctatttggaagaagttttcgggaaaatattgcctatggcctgacgcggactccaaccatggaggaaatcacagctgtggccatggagtccggagcccacgatttcatctctggattccctcagggctatgacacagaggtaggtgaaactgggaaccagctgtcaggaggtcagcgacaggcggtggccttggctcgagccttgatccggaagccacgcctgcttatcttggacgatgccaccagtgccctggatgctggcaaccagctacgggtccagcggctcctgtatgagagccccgagtgggcctctcggacggttcttctgatcacccagcagctcagcctggcagagcgggcccaccacatcctcttcctcaaagaaggctctgtctgcgagcagggcacccacctgcagctcatggagagaggagggtgttaccggtccatggtggaggctcttgcggctccttcagactgacgggcttctggactgcaagctgcgcgagtccctccccctgctgtcctctgctctgtgtggcggagaacctgggagcaaagattttaccacatccacggagatagttgaggagcgatggtgtttgttacatgaggaaaatgtaacctctaggagatgcccggaatttaccacnaatgttttcccgccccgccccctgttagacgggggatgggggtaggtaccccaggctaacactgagctgctgagtctcctgtctcccgtggagtttgcatcacggcatgcgcccacaaacctggcttatgtggcgttgggacagaatgagaagaaacgctcaaaatgtacagagaaggggcaaatagcttgcaattaaccaaaggcataggctggcctatgggtgttccgcgggttcttgatatttataataaaactggtgttttgtaaaaaaaaaa

SEQ ID NO: 585 - DNA, 318 bp, Rattus norvegicus (rat)
  misc_feature (99)..(99): n
agcaaagattttaccacatccacggagatagttgaggagcgatggtgtttgttacatgaggaaaatgtaacctctaggagatgcccggaatttaccacnaatgttttcccgccccgccccctgttagacgggggatgggggtaggtaccccaggctaacactgagctgctgagtctcctgtctcccgtggagtttgcatcacggcatgcgcccacaaacctggcttatgtggcgttgggacagaatgagaagaaacgctcaaaatgtacagagaaggggcaaatagcttgcaattaaccaaaggcataggctggccta

SEQ ID NO: 586 - DNA, 744 bp, Rattus rattus (black rat)
ctcttcctgtctgtgccagaactgcgcgtggtccgcgccgatcgactgagaagcccggtttgcgctctcagaatgactgaatgggaaacagccacacccgcggtggcagagaccccggacatcaagctctttgggaaatggagcactgatgatgtgcagatcaacgatatttctctacaggattacattgctgtgaaggagaagtatgccaagtacctgccccacagtgcaggacggtatgctgccaacggtttccgcaaagcacagtgtcccatcgtggagcgccttactaactccatgatgatgcacggtcgtaacaacggcaagaagctcatgactgtacgaattgtcaagcatgcctttgagatcatccacctgctcactggtgagaaccctctgcaggtcctggtgaatgctatcatcaacagtggcccccgagaagactcaacacgcattgggcgggctggaacagtgagacggcaggctgtggatgtatccccacttcgccgagtgaatcaggccatctggctgctgtgcacgggggctcgtgaggctgctttccggaacatcaagaccatcgctgagtgccttgcagatgagctcattaatgctcgcaagggctcctccaactcctatgctatcaagaagaaagatgaactggagcgtgtggccaagtctaaccgctgatttcccagctgctgcctaataaattgtgtgccctttgggacagttacatcaaaaaaa

SEQ ID NO: 587 - DNA, 531 bp, Rattus norvegicus (rat)
atgatgtgcagatcaacgatatttctctacaggattacattgctgtgaaggagaagtatgccaagtacctgccccacagtgcaggacggtatgctgccaacggtttccgcaaagcacagtgtcccatcgtggagcgccttactaactccatgatgatgcacggtcgtaacaacggcaagaagctcatgactgtacgaattgtcaagcatgcctttgagatcatccacctgctcactggtgagaaccctctgcaggtcctggtgaatgctatcatcaacagtggcccccgagaagactcaacacgcattgggcgggctggaacagtgagacggcaggctgtggatgtatccccacttcgccgagtgaatcaggccatctggctgctgtgcacgggggctcgtgaggctgctttccggaacatcaagaccatcgctgagtgccttgcagatgagctcattaatgctcgcaagggctcctccaactcctatgctatcaagaagaaagatgaactggagcgtgtggccaagtcta

SEQ ID NO: 588 - DNA, 1547 bp, Rattus norvegicus (Norway rat)
gcacaagtttcctgggctggaccatttgagcagagaggattatttgacttcatgctagaagatgaggcctctggcataatcccttacgaccctgacaatcccctgatatctatgtgcccctaccgatgccaatgccatctccgagtggtgcagtgttctgatctgggtctggacaaagtaccctgggaatttccacctgacacaacattgctagacctgcaaaacaacaaaataacagagatcaaagagggggcctttaagaacctgaaggacttgcataccttgatccttgtcaacaacaagatcagcaagatcagcccagaggcatttaaacctctagtgaagttggaaaggctttatctgtctaagaaccacctaaaggagctgcccgaaaaattgcccaaaacactccaggagcttcgactccacgacaatgagatcaccaaactgaagaaatctgtgttcaatggactgaaccgtatgattgtcatagaactgggcggcaacccactgaaaaactctgggattgaaaatggagccttgcagggaatgaagggtctcggatacatccgcatctcagacaccaacataactgctattcctcaaggtctgcccacttctatcagtgaactgcatctggatggcaacaagatagccaaagttgatgcagccagcctgaaaggaatgtctaatttgtctaagctgggtttgagcttcaatagcatcaccgttgtggaaaatggcagtctggctaatgttcctcatctgagggagctccacttggacaacaacaaactcctcagagtgcctgctgggctggcacagcataaatatgtccaggtcgtctaccttcataacaacaacatctccgaagttgggcagcatgacttctgcctcccttcataccagactaggaagacttcctacactgccgtgagtctttatagcaaccctgtccggtattggcaaattcacccacacaccttcagatgtgtcttcgggcgctctaccattcaacttgggaactacaagtaactcccaaacagcctcatttttataatcgggaacaaaaaaaccaatctgtcaatattattgctaaaaagaaaaaaatattttgaaaaagaaagaatgctagattctggaaattcaagtatagcgcggatgcctttcccgtatgacttatcatgcatcaagccaaatatacagattgaataattacctacaataaaaatattttatctgtagtattcagaatcacttttaaaattttctgtagatgtgaactgaggtatcgaagtctgatgtaatcatagatgtcaacatttaataaagctaaaaggaacagaatacaaagtcttctgtaattcatagagctaaattgactcttttgacataaagtcaaatgtagaactctagcaatgtattaatctcctttattattggtaaagtcttatttgaatatctaagttcaacatgggctatgtaaaattttcactgtcatactgaaaaacaataaaatttaaaaaatgcattcaaaaaaaaaaaaa

SEQ ID NO: 589 - DNA, 631 bp, Rattus norvegicus (Norway rat)
ctgttagcggccagaggtgacctgtgaagatggttcgctactcccttgacccagaaaaccccacgaaatcatgcaagtcaagaggctcaaaccttcgtgttcactttaagaacacccgggaaactgcccaggccatcaagggtatgcatatccgcaaagccaccaagtatctgaaggatgtcactttaaagaagcagtgtgtgccattccggcggtataacggtggagttggtaggtgcgcccaggccaaacagtggggctggacacagggacggtggccaaaaaagagtgctgaatttttgctgcacatgcttaaaaatgcagagagtaatgctgaacttaagggtttggatgtagactctctggtcattgaacacatccaggtgaacaaggctcctaagatgcgcagacggacctacagagctcacggccggattaacccatacatgagctccccctgccacatcgaaatgatcctcactgagaaggaacagattgttccaaagccagaagaggaggttgcacagaagaaaaagatatcccagaagaaattgaagaaacaaaagctcatggcacgggaataaattcagcataaataaatgcggataaagtaaaaaaaaaaaaaaaaaaa

SEQ ID NO: 590 - DNA, 1194 bp, Rattus norvegicus (Norway rat)
ttcgccgcgcccgcgcccgcgcaccacgacttcctttccgacctcttcgccgacgactacggcgccaagccgagcaagaagccgtccgactacggttacgtgagcctcggccgcgcgggcgccaaggccgcaccgcccgcctgcttcccgccgccgcctcccgccgcactcaaggccgagccgggcttcgaacccgcggactgcaagcgcgcggacgacgcgcccgccatggcggccggcttcccgttcgccctgcgcgcctacctgggctaccaggcgacgccgagcggcagcagcggcagcctgtccacgtcgtcgtcgtccagcccgcccgggacgccgagccccgccgacgccaaggccgcgcccgccgcctgcttcgcggggccgccggccgcgcccgccaaggccaaggccaagaaggcggtggacaagctgagcgacgagtacaagatgcggcgcgagcgcaacaacatcgcggtgcgcaagagccgcgacaaggccaagatgcgcaacctggagacgcagcacaaggtgctggagctgacggcggagaacgagcggctgcagaagaaggtggagcagctgtcgcgagagctcagcacgctgcggaacttgttcaagcagctgcccgagccgctgctggcctcggcgggtcactgctagcccggcgggggtggcgtgggggcgccgcggccaccctgggcaccgtgcgccctgccccgcgcgctccgtccccgcgcgcgcccggggcaccgtgcgtgcaccgcgcgcacctgcacctgcaccgaggggacaccgtgggcaccgcgcgcacgcacctgcaccgcgcaccgggtttcgggacttgatgcaatccggatcaaacgtggctgagcgcgtgtggacacgggactgacgcaacacacgtgtaactgtcagccgggccctgagtaatcacttaaagatgttcctgcggggttgttgctgttgatgtttttgtttttgttttttgttttttgttttttttttggtcttattatttttttgtattatataaaaaagttctatttctatgagaaaagaggcgtatgtatattttgagaaccttttccgtttcgagcattaaagtgaagacattttaataaacttttttggagaatgtttaaaaaaaaaaaaaaaaaaaaaaaaaaaaaaaaaaaaaaaaaaaaaaaa

SEQ ID NO: 591 - DNA, 1632 bp, Rattus norvegicus (Norway rat)
gaattaacattgatggagaaaccaagatattccatgacaaaaccaaatttacacaatatctttctacaaatccagcactacaaaggataataaatggtaaagcccaacataaggaggcaagctataccctagaggaagcaagaaactaatcgtcttggcaacaaaacaaagagaatgaaagcacacaaacataacctcacatccaaatatgaatataaagggagcaataatcactattccttaatatctctcaatatcaatggcctcaactccccaataaaaagacatagattaacaaactggatacgcaatgaggaccctgcattctgctgcctacaggaaacacacctcagagacaaagacagacattacctcagagtgaaaggctggaaaacaactttccaagcaaatggtcagaagaagcaagctggagtagccattctaatatcaaataaaatcaatttccaactaaaagtcatcaaaaaagataaggaaggacacttcatattcatcaaaggaaaaatccaccaagatgaactctcaatcctaaatatctatgccccaaatacaagggcacctacatacgtaaaagaaaccttactaaagctcaaaacacacattgcacctcacacaataatagtgggagacttcaacaccccactctcatcaatggacagatcatggaaacagaaattaaacagtgatgtcgacagactaagagaagtcatgagccaaatggacttaacggatatttatagaacattctatcctaaagcaaaaggatataccttcttctcagctcctcatggtactttctccaaaattgaccatataattggtcaaaaaacgggcctcaacaggtacagaaagatagagataatcccatgcatgctatcggaccaccacggcctaaaactggtcttcaataacaataagggaagaatgcccacatatacgtggaaattgaacaatgctctactcaatgataacctggtcaaggaagaaataaagaaagaaaataaaaagtttttagaatttaatgaaaatgaagatacaacatacccaaacttatgggacacaatgaaagctgtgctaagaggaaaactcatagcgctgagtgcctgcagaaagaaacaggaaagagcatatgtcagcagcttgacagcacacctaaaagctctagaacaaaaagaatcaaatacgcccaggaggagtagaaggcaggaaataatcaaactcagagctgaaatcaaccaagtagaaacaaaaaggaccatagaaagaatcaacagaaccaaaagttggttctttgagaaaatcaacaagatagataaacccttagccagactaacgagaggacacagagagtgcgtccaaattaacaaaatgagaaatgaaaagggagacataactacagattcagaggaaattcaaaaaatcatcagatcttactataaaaacctatattcaacaaaatctgaaaatcttcaggaaatggacaatttcctagacagataccaggtatcgaggttaaatcaggaacagataaaccagttaaacaaccccataactcctaaggaaatagcagcagtcactaaaggtctcccaaccaaaaagagcccaggtccagac

SEQ ID NO: 592 - DNA, 2073 bp, Rattus norvegicus (Norway rat)
ccaaaaaaagcccgctcattaggcggcgtggcctcgatggccatttaggtgacactatagaagggacgacactcgagggatcttgtgcacttttctcctctggtttacaaccgtcatctttctctgactttctttgtttcttccccgttgctttagtctttgcagaagacgtgctcggttggctagacatctggcattccacttcttcccttggctcctctgcacgccccttcttgcttccagacggctccatcttgaatttagatgagacctccgaaagaaagttctcctaagcttcccttccacaggagtcttagagcttccctgatgtttgactgtggctctctgtatgtcagttcccccacctctctctgtgtggaatgaatttcgcccccctcttatcccacccccgtaaacctcagttcttccctgcaaatcttcttcccacattcacgacttgtttcatgtcctaaggacattatctagtgccatgtgcgtgactgtgagtttggaagcctgcgggtcaccagtgggttcacaactgagtacaattcctccttctctcattaggcagcaatgagtgtcaggccctgtctctttctcactggcaccaaagggtggcaggtgttgaattttggtggatagatatagtagaggaatatttctttgtgagtctgtgtcttccatatcccaggcttgtctcaaacactctatgttgctttgaactttgtctttgaacttctgatgcccctgcctctgctctgtaagtgcaggattgcagaagtctattacttatgatagtacactggggatagagccagagttctgtgactgctaagcagaatgtctctccaccaactgatccttatcattactcctagcgtttctttttcttttttcacaaagaagcactcatcatgagtgctggacagtgcctcaggggttgagtgggcttttgcacttctggagaactggtgcttgattcctagacattacagtggagatataggtccttgagcagctccagtatttttcagtgaaggagaaagtccttctgtaatggtgtgcagatgacacagttttggcttaatttcatgaagatttgaatgaagtcagccttggtgagagattattttatattatcgaatttgcttgaatttctgatagaaacaatctaagaaactttggtcttacttatatggcactgttgttcactgacgccacccacaatgttaactcaaaggaggtcaaaataggctgtagatgaacttcatgaactgtctaggggaagagagtaccaaagtccacgtgaggcagaggtgatccatctactggctggatcctggtgccacccatctttccagcatataagtactgcaggctggcctcagtgcagcggtgtgggcagaaaggaagccctgcagagcatcagaggcccagctagagggacaacacagaggagtaatttgctgacagacctgcagggatggacctgctttcagctctcacactggaaacctgggtcctcctggcagtcgtcctggtgctcctctacgggtgagtgacttcagaagttccccctgcgaccaggttcttgggtttgaagttatattcagacctgaacttttttattattgggtggctcaaactggtaccagaatcaggctggagtgatgatggctccgtgtttaaggccagtggctgctcttcagaggatcactatttgaaccccaacatccacatgcaactcacagtcatctgtaactatggctaaaggtgatctgacaccttccacaggcaagctaggatgggactgaaaggcggcagttttctaatctggctaactcctaaataattaaaagagaggactattaagtttattagcaagctttaaggactatgacggggcaggttctaagctattcttacccacaaagctctctcaaccatagtccccaaatacttgcagtgtgactttttccctgggttgctctgttccgtgtgtgtcctcatggtaagctcccttggtgaatccttctcatgcctgcttttgtggtgtccttgttcttcctc

SEQ ID NO: 593 - DNA, 843 bp, Rattus rattus (black rat)
ctcttttggccttgcttgccggcagactcgccgccatgggccgtgtgatccgaggccagaggaaaggtgccggttctgtgtttcgtgcgcacgtgaagcaccgtaagggagccgcgcgtctgcgtgctgtggacttcgcggagcgacacggctacattaaaggcatcgtaaaggacatcattcatgaccctggccgcggcgctcccctcgcgaaagtagtctttcgtgatccctatcgattcaagaagcggacagagctgttcattgccgcagagggaatccacactggacagtttgtgtactgcggcaagaaggcccagctgaatattggcaatgttttgcccgtgggcaccatgcctgagggtactatcgtgtgttgtctggaggagaagcctggggacaggggcaagctggcacgagcctccgggaactatgctacagtcatctcccacaacccagagaccaagaagacccgagtgaagctgccttcagggtccaagaaggtcatttcctctgctaaccgagctgttgttggtgtcgtggctggcgggggcagaattgacaagcctatcttaaaggctggccgtgcctaccataagtacaaggcaaagaggaactgctggccacgtgtgcggggtgttgccatgaatcctgtggagcatccctttggcggtggtaaccaccagcacattggcaagccttccactatccgaagagatgccccagctgggcgcaaagtgggtctcattgctgctcgccggactggacggctacgtggaaccaaaactgtacaggagaaggagaactagagttcaggagctaataaagtatgtgctttggcta

SEQ ID NO: 594 - DNA, 3219 bp, Rattus rattus (black rat)
agggactggatgatgctgtcccgctggagaggattcgtggcttgagtcctgttccacccgatcaccgatcaccggggtggccgaggccggtaccagcgctgcggctctctcagctctgccacattccctgagttaacatatgagagattggtataaaatggctggcattttgtctggataaatcacacaaccctcccagaaagtgatcaccaggtaaaggtcaagtggatttcgaatagtgtctgagaccaactcaacccagaaaaacaaaatggcccttaactcttctgctgaagatggtatcaaaagaatccaagatgactgccccaaggctggcaggcacagttacatatttgtcatgatccctaccctctacagcatcatctttgtggtgggaatatttggaaacagcttggtggtgattgtcatttacttttacatgaagctgaagactgtggccagcgtctttcttctcaatctcgccttggctgacttatgctttttgctgactttgcccctgtgggcagtctataccgctatggagtaccgctggcccttcggcaatcacctatgtaagatcgcttcggccagcgtgagcttcaacctctacgccagtgtgttccttctcacgtgtctcagcatcgaccgctacctggccatcgtccacccaatgaagtctcgccttcgccgcacgatgctggtggccaaagtcacctgcatcatcatctggctgatggctggcttggccagtttgccagctgtcatccaccgaaatgtatacttcatcgagaacaccaatatcacagtgtgcgcgtttcattatgagtctcggaattcgacgctccccatagggctgggccttaccaagaatattctgggcttcttgttccctttccttatcattctcaccagctatacccttatttggaaagctctaaagaaggcttatgaaattcaaaagaacaaaccaagaaacgatgacatctttaggataattatggcgattgtgcttttcttcttcttttcctgggtcccccaccaaatattcactttcctggatgtgctgattcagctgggcgtcatccatgactgtaaaatttctgacatcgtggacactgccatgcccatcaccatctgcatagcgtattttaacaactgcctgaaccctctgttctacggctttctggggaagaaatttaaaaagtatttcctccagctcctgaaatatattcccccaaaggccaagtcccactcaagcctgtctacgaaaatgagcacgctttcttaccggccttcggataacatgagctcatcggccaaaaagcctgcgtcttgttttgaggtggagtgacaggttcaaagcacactggcaatgtaatgccctgacagaagccagggcagcctctgactaaatggcttacgaccaaaggaccattcaccctgcctcaggatctaagcagaaaaatgcgctcatcagactgtagataatgactaaaactctgagagaagactttgaaggagtaaccaagcaaagccgtcttgcattaatagatgatggctagccaaaggaagagtcaggagctggatggattggtgggtctggaaaacagttcgctggcagaaatgcaatctcatcagtctccctttgctatgttccttttgatttccacacgtaggtatgtggcccatgctaaatatttaggcaagaaacaagagatggaaatcaaggtcacttgttctgttcaactcccaaagggcaaggaacctttgttgtccctgtagtcattagcagtggagacccacttgtcactgttactacacctatcgtgcaaagatttgctaatctgtagttatcaagtttcaggactcctttgtaaaattcagccagtgttttagaaacatgtactgtccccagacaatgctagccagtggtgtacttatgtagcagtgttacccaagtccacacatcaaagtcacactgctttaataacgtgacatactaggtacatctgcgttatttcgcatctgagaaatgtacacagtcagaggtgaatacactatattccatacagtctgccttgctctctaaaaatatatattctccacatacgtgaacatctttatctctaaactgtcatttgatgaaattttggcaatgtatgtttacctctaaataaagtaattttattgtaatgtaaaaaaaaaaaaaaaaagaggcatctaggtctcagccacctaacttcctgcctgcactcttctcaacagtctagggactctgggcagtgctggccgcctgggttctcaccagcaccacggacgtgctgtcgaagatggtctgtaggtacacgaggatgggagtgatgcctgtcagctgctgcagaaaacgcatcagcactgtaatgagaataggccggtacacacggggctcccaggcctccgcccacgacactcggctactctggaacacaaagcgtctgttgagggctatgcaggctctccagccctggccaccctgtcttggcacctgcgggtcgaggagagacctccttccctcatccaagagaggcccaaccaccagaggctgcatgggctctgcatgctagcaggaacctctcctttgaggaaaggcagccaaagcacagagaggcctggtggatgtccaaggctacccagagcttcctgggttggggcccgaccaggcgggtaccacacatgcttcaccgtctccgcacgttgtcctggatctgctcaaactcccagtggacctcagagtccgctcgcagccagatcagcgcctgcagtgcttcctcatcccggctcttagacagtaggaagcgaggcgagttgggcatgaagctaagcagcaggatcatgaccagaacaggcccctccccggccacgcaagccatgcccaaggcagcagaagacctggtgagagaggcttcggtgagcagatgggccctctgttgctctcccagcctagcttcccgactgcccaagtccctgtaggaggggcaatgtgggactttaagaattgcctggggctggagagatggctcagcgattaagagcacccgactactcttccagaggtcctgagttcaattcccagcaaccacatggtggctcacaaccatctgtaaagagatccgataccctcttctggtgtgtctgaagacagctacagtgtacttatatgtaataaatgaataaatcttt

SEQ ID NO: 595 - DNA, 785 bp, Rattus norvegicus (Norway rat)
gccccgatggctgacctggcggcagcagtgtggtcagtgcaggggaagcttaggtcccagcatgtatgtcccccatcaagcgtcaccgggtgggtttctcagtccctcctgccccaccctactgagaatcctgcaccaggttggctgagccccttggctggacaacaggaagtaggatggtgttggctccacccactttgctgctcttccctgggacaagacagatgggcgctaccacccatctcgagtgaggtcctgagcacttccacctaaggcagacggggctccaacaggcgcctcccccactacactcttcctctagcagggcaccaaggagctcgccttgcccccctctccttttgctcctccctgcccccaaggttctggttccactttttcctctgttcacaaactacctctggacagttgtgttgtgttttttgttcaaatgttcattcttagacacccaccattgctgctaccagcgccagatgtccatcctcccgattttgcctgtaccccccacacaatacactctaggggaagggggggctggtgtgcagcagcaggctggttaccgagtaccccacgctagggaagatggccccgccccgtggatgctgcagcagagtgaggagggggggcccacttggatgggaaaagggtataggaccacctccccttgttgtgggggaggggtggccagtatttgtcccagcctggggctccccctctggtttcctatttgcagttacttgaataaaaaaaaatagccttttctggac

SEQ ID NO: 596 - DNA, 1339 bp, Rattus rattus (black rat)
ggtgacagagaccagaccagacacacacacctttccagcgccagcgctgtggatggggagctgccaccaggcttgaaagaagcccagagctggcgactgcacacggtgcattttaaatagtgtcagagagcaattcacgtcgccaagggagacatgacccttaactcctctactgaagatggaattaaaagaatccaagatgactgccccaaggctggcaggcacaattacatatttgtcatgatccctactctctacagcatcatctttgtggtgggaatatttggaaacagcttggtggtgattgtcatttacttttacatgaagctaaagactgtggccagtgtttttcttctgaatcttgccctggctgatttatgctttttgttgactttgccactgtgggcagtctataccgctatggaataccgatggcccttcggcaaccacctatgtaagatcgcttctgccagcgtcagtttcaatctctatgccagtgtgtttctgctcacgtgtctcagcatcgatcgctacctggccattgtccacccaatgaagtctcgcctccgccgcacgatgctggtagccaaagtcacctgcatcatcatctggctaatggctggcttggccagtttgccagccgtcatctaccgaaacgtatatttcatcgagaacaccaatatcacagtttgcgcttttcattatgaatctcagaactcaacactccccattggactgggtctaacaaagaacattctgggcttcgtgttccctttccttatcattctcaccagctatactcttatttggaaagccctaaagaaggcttataaaattcagaagaacacgccaagaaatgatgacatctttaggataattatggcgattgtgcttttcttcttcttttcctgggttccccaccaaatattcacttttctggatgtgctcattcagctgggcattatccgtgactgtgaaattgctgacattgtggacaccgctatgcccatcaccatctgcatagcttattttaacaattgcctgaatcctctgttttatggctttctggggaaaaaatttaaaaaatatttcctccagcttctgaaatacattcccccaacggccaagtcacacgcaggcttgtcaacaaaaatgagcactctttcctaccgcccttcagataacatgagttcatctgccaaaaagtctgcatctttttttgaagtggagtgagagggttcaaagcctgcaagtgaagtgatttcctgacagcagaagccagaggaccatttgggctaagcagctcactcactaccgaagagtgttcaacctccagcaa

SEQ ID NO: 597 - DNA, 3091 bp, Rattus norvegicus (Norway rat)
gccaacccagatcccgaggtgcgccacgcccagcccagatctccacgcctgccaggagcgagcttcgccggctcgctgtcccccgagcagcctctgtccttctgtccgagtcccgcgcccttctcgggacccctgcccagcggcagcactgccaccctgccggccatggagaccccgtctcagcggcggcccacccgcagtggggcgcaggccagctctacccctggtcgcccactcggatcacacggctgcaggagaaggaggacctgcaggagctcaatgaccgtctggccgtgtacatcgatcgcgtgcgctccctggagacggagaacgcggggctgcgccttcgcatcactgagtctgaagaggtggtcagccgagaggtgtccggcatcaaggcggcctacgagcgagctgggggatgcccgcaagaccctcgactctgtggccaaggagcgcgcccgcctccagttggagctgagcaaagtgcgtgaggagttcaaggagctgaaggcgcgcaataccaagaaggagggggatttgttggctgcgcaggcccggctcaaggacctggaggctcttctcaactccaaggaggctgccctgagcactgctctcagtgagaaacgcacgttggaaggcgagctccatgatctgcgggggcaggtagccaagcttgaggcagccctgggtgaggctaagaagcaactccaggatgagatgctgaggcgagtggatgctgagaacaggctacagaccctgaaggaggagctggatttccagaagaacatttacagtgaggaactgcgtgagaccaagcgccggcacgagacccggctggtggagattgataatgggaagcagcgagagtttgagagccggctggcagatgctctgcaggagctgcgggcccagcatgaggaccaggtggagcagtacaagaaggagctagaaaagacatactctgccaagctggataatgcccggcagtctgccgagaggaacagcaacctcgtgggagctgcccatgaggagctccagcagtctcgaatccgcattgacagcctctcagcccagctcagccagctccagaagcagttggcagccaaggaggccaagctgcgtgacctggaggactccctggcccgtgagcgggataccagccggcgcctgctggctgaaaaagagcgggagatggctgagatgcgggcaaggatgcagcagcagctggatgagtaccaggaattgctggacatcaagctggccctggacatggagatccatgcctaccgaaagctgctggagggcgaggaggagaggctacgcctgtcccccagccctacctcgcagcgcagccgtggccgcgcctcctcccactcctcccagtctcagggtggaggcagcgtcaccaaaaagcgcaagctggagtcttctgagagccggagcagcttctcgcagcatgctcgcactagcggccgtgtggccgtagaggaagtagatgaagagggcaagttcgtgcggctgcgcaacaagtccaacgaggaccagtccatgggcaactggcagatcaggcgtcagaatggtgatgatcctttgatgacttatcgcttcccaccgaagttcaccctaaaggccgggcaggtggtgacgatctgggcttcaggagctggggccacccatagcccccctactgacttggtgtggaaggcacagaacacttggggctgtgggagcagccttcgcacggctctcatcaacgccactggagaagaagtggccatgcgcaagctggtgcgctcactgaccatggttgaggacaatgacgatgaggaagaggatggagatgagctgctccatcaccaccgtggctcccactgcagcagctcgggggaccccgctgagtacaacctgccgtcagcaccgtgctgtgcgggacatgtgggcagcctgctgacaaggctgccagtggctcaggaccgcaggtgggcggatccatctcctctggctcttctgcctccagtgtcacagtcactcgaagcttccgcagtgtggggggcagtgggggtggcagcttcggggacaacctagtcacccgctcctacctcctgggcaactccagtccccggacccagagctcccagaactgcagcatcatgtaatctgggacctgccaggcgagggtgggggcagaggccacctgctccctcttcaccacatgccacctcctgccctgttccttatgagagcaggtctgaagccaaagaaaactatcccctgcctttgggtgtttttcttttttccttctattttttttctaagagaagttattttctacagtggttttatactgaaggaaaaacacaagcaaaaaaaaaaaagtgtctttatctcaatccttagtccttcccttttccctgtatctgccttaaaccaaagggcttctcataggagcccagggaaaggactgcttttgtagtctagatttttgtcctgctgccttgcgtttgccctcatcccaggaccctgtgacacggtgcctgagaggcaggcatggagttctctttaccggcctcctccacagctggcccactgccatgccagctgcaaagaaaaggggtgcagagagaatgactgaaaggtcaagcccctcctggctcactacacttggccgagactcctctgcctgccttaccctcctgccttcccgagcctgggacgagtggattcccagaggcaaatctgccatgcttgcttttttctatattgtattcagacaagagatgggaaagatggggaaggagaagggacggtcagtttgaacctacctttcccccgtgcgtacagcctgctggtgggctctgtctgtcggtggagggcagtattaagtgggattggggagagagtgagggaaaggctcctggagattgggagaacctgctggggccagtgagaagactagagggtgtggtgattggtggctacagcaaacactaaggaacccttcattcccacttcccatctgcacctctgctctccccccaaatcaatacactagttgtttccatcccgaaaaaaaaaaaaaaaaaaaaaa

SEQ ID NO: 598 - DNA, 1489 bp, Rattus norvegicus (Norway rat)
caagattgccctgctggaggaggcacggaggcgcaaggaggacgaggtggaggagtggcagcaccgggctaaagaggcccaggacgacctggtgaagaccaaagaggagctgcacctggtgatgacggctcccccgcccccacccccgcccgtgtacgagcccgtgaattaccacgtgcaggaggggctgcaggatgagggagcagagcccatgggctacagtgccgagctctccagcgagggcatcctggacgaccgtaacgaggagaagcggatcaccgaggcagagaagaacgagcgcgtgcagcggcagccgttgactctgagcaatgagttgtcccaggcccgggatgagaataagaggacccacaatgacatcatccacaatgagaacatgcggcaaggccgggacaagtataagacgctgcggcagatcaggcagggcaacaccaagcagcgcatcgacgagtttgaggccatgtagaggccaggccgggaccaagggcggagggcacctcacagcaggcaggtgtcactcttggctctttagtactctataagtctagaaacccccttgccgtgttccagtcccttaaagagcaggtaccgggcgatgttctgccccaagacccagtggaatcctccctggttgcttccaatagtatcacatagtgccaaacaggccagatttttatgacagttgccgaatcacttcccgttcggagcagggattcggagggctggcccgaatgacgcgattcagtgtcactggggataataatagcactgtggctcacacacgggtgccatactttctctagttttacaatgagctcaaatcgattttgttcttgatttctatgaaggatccatctctgtgtgttgaggggtgaaaatgattttgaaatttgagtcttaagacgccccacacagtctccttcctccagaccgctggcagagtctcctgcggtccctcagagtgtacggtacaggactctccgatacaaaattctcatgcttaccctgttagcattcattgttggactgatacacctaatgatcttctatagagaatagtatttatatataagcgataatatgggtttgtaacattagttttaaaaagggaaagttttgttctgtatattttgttaccttttacagaataaaagaattcaacattaagaaccagtaatcacgacacttgatctgacacgggggcaggtgggagaccgatgaccggaatcgccgctgtacaaaaatgttagtgggttttgtgcatgtaaaacgcacacttcaacttcctgtcagttcttcactgagagcagtcagactctagcccgaagggactcaggcctgtttattgtgaacaacttgttcctgttttcagtttgtcttccttccttgagccggactgtcctttttggttgtgatgtcctgtgcaggtcactccgcaccagatttacacacaataaaagttctccaaggc

SEQ ID NO: 599 - DNA, 2450 bp, Rattus norvegicus (Norway rat)
gtcgacccaatggggcggctttgcaccaagttcctgtcctccgtgagctgtctgattttgctatgggtgactggctctgggggcatcaaggtcctgggtgaccccacctgcttctctgactacatccgcacttctacgtgtgagtggcagctggatagcactgtggactgcagttctcagctcctcctggactacaggctgctcttcgagttctctgaaaacctcacatgcacccccaagaacagtgccgacaccgtgtgtgtgtgccaaatggccatagaggagccgatccaggcagacacatactggctggaactgtggtctgagcggggacagctgtggcaaggctccttcaagcctagtgacaatgtgaagcccccagctccagacaacctcacactccacaccaatgtctccaatggcctgctgctgatgtggagcaacccatacccatcgaacaacttcctgcacaaaggcctcatctgcatggtcaacatctccagagaggacaacccggcggaattcaaagtctataatgtgacctacacggaacccaagctgagcttcccagtcaacaccctaacatcaggggtgcgctatagggcacgtgtgagggtcttgtcccagagcttccctggcatctggagtgagtggagtcccagcatcacgtggtacaaccacttccagctgcccctgctgcagcgcctcccgctgggtgtcagcatctcctgcatctgcatcctattgttttgcctgacctgttacttcagcattatcaagattaagaagatatggtgggaccagattcccactccagcacgcagtcccttagcagccatcatcattcaggacacgaaggtgctcctctgggagaagcagacccgaagccaggagtcaaccaagagccggcactggaagacttgtctaaccaagctgctgccctgcttgctggagcatagagtgaagaaagagagagaatccccgaaggctgccaaaaccaagcctctccagagtcctgaaaaagcaggctggtatcctgcggaggtcagcaggaccgtcctctggccagagaacgttcatgtcagtgtggtgcgctgtatggagctgtttgaggccccagtacagaatgtggaggaggaagaggatgagatggtcaaaggggacctgagcatgtcacctgagaacagcggagggggcttccaggagagtcaggcagacatcatggcccggctcactgagaacctgttttcagacttgctgggggctgagaatggaggcgttggccagtcgagcatggcagagtcatcctcccttctgccttcagaaagtgggcaagcttctacgtcctgggcctgcttccccacggggcccagtgagaccacatgccaggtcacagggcagcagcctccacacccagaccctgagagagcaactggcacagcctgcacacaggtcccccttgtcatttcagacaatcctgcctaccggagttttagtgacttctccagccccgccccaaatcctggagagctggcttcagaacagaagcaggctggacatctggaagaaggggatcttctgagcccggttgacccccattcttcagggccaccaatgcagcaagcggagagctgggagcagatccttcacatgagtgtcctgcagcacgggacagctggctccaccccagcccctaccagtggctaccaagagtttgtgcaggcagtgaagcagggtgcgtcccaggccaggtgggtgcctggtgtcgggccttctggagacactggttacaaggctttctcgagcctgctcagcagcagtggcgtctgcacggacacagcagcagcagggactgacagtggatgtggagggtacaagcccttccagaaccctgttcctaaccagtcccccaactccatgcccttattcaccttcggactggacatggagctgccacccagtcccctgaactcagccccacccaatagcaccccagaatgccttggtctagagctggggctcaaaggaggcacctggctgaaggcccctcctccttcagagcaggtgcccaagccctttggggatgacctgggccttggcattgtgtactcgtccctcacctgccatctgtgtggccacctgaagcaacaccacagccaggaggaagatggtcagatccatgtcgttgcatgccctggctgcggctgttgctatgatgaaaaatcaccatccttggggaatctctcggggaccttggagagctgtcctggggaaatgtcacaggaagccaacctcaccttagcacccaggacaccctccaatttgtcaggggtgcaaggccctggccactctcctgttcccagccagactactgaggtacctgtgggcactctgggcgtcactgtgtcttaggtgagtgtgctgttgttgctgaggtctgtgctgtcgac

SEQ ID NO: 600 - DNA, 2217 bp, Rattus norvegicus (Norway rat)
tgcccccggagagaaaggtgaaggaggccctcctggtgccgcaggaccccctggtggttctggacctgctggtcctcctgggcctcaaggtgtaaagggtgaacggggcagtcctggcggtcctggtgctgctggctttcccggtggccgtggtcttcctggtcctcccggcaacaatggtaatccagggcccccaggacccagtggtgctcctggcaaggatggccctccaggtcctgcaggtaacagtggttctcctggaaaccctggagtagctggaccaaaaggtgatgctggccaaccaggagagaaggggccacctggtgctcagggtcctccaggatctccaggtccacttggaattgcagggctaactggagcacgaggtcttgctggaccaccaggcatgccaggtccacggggtagccctggacctcagggtatcaagggtgaaagtggaaagccaggagccagtggccataatggggaacgtggtcctcctggaccccaaggtcttcctggtcagcctggtacagctggtgagcccggaagggatggaaaccctggatcagatggtcagccaggtcgagacggatctcctggtggcaagggtgatcgtggtgaaaatggttctcctggtgccccaggcgctcctggtcatccaggaccacctggtcctgttggtccatctggaaaaaatggtgacagaggagaaacgggtcctgctggtccttctggtgctccaggtcctgctggagctcggggtgctcctggtccccaaggtccacgaggtgacaaaggtgaaactggtgaacgtggctctaatggcatcaaaggacatcgaggattccctggcaatccaggtcccccaggttctcccggtgctgctggacaccagggtgcagttggtagtccaggccctgcaggtcccagaggcccagttggtccacatggacctcctggaaaagatggatcaagtggacatccaggtcccattggaccaccagggcctcgaggtaacagaggtgaaagaggatctgagggctcgcccggtcaccctggacagccaggaccccctggaccccctggtgcccctggtccctgctgtggtggcggtgctgccattgctggagttggaggtgaaaagtctggcggcttttcaccatattacggggatgatccaatggatttcaagatcaacactgaggagatcatgtcttcactcaagtctgttaacggacaaatagagagtcttatcagccctgatggttctagaaaaaaccctgctcggaattgcagagacctgaaattctgccaccctgaactcaagagtggagaatactgggttgatcctaaccaaggctgcaagatggatgctataaaagtgttctgtaatatggaaaccggagaaacatgcataaatgccagtcccatgactgtcccgcggaagcactggtggacagatgctggtgctgagaagaaacatgtttggtttggagaatctatgaatggtggctttcagttcagctatggcaatcctgatcttcctgaagatgtccttgatgtacagctggccttcctcagacttctttccagccgggcctcccagaacattacataccactgcaaaaacagcattgcctacatggatcaggccaatggcaatgtaaagaagtctctgaagctgatgggatccaatgagggagaattcaaggctgaaggaaatagcaaattcacttacacagttctagaggatggctgcactaaacacactggtgaatggagcaagacagtctttgaatatcaaacacgcaaggccatgagactccccatcatagatatcgcaccctatgacattggtggtcctgatcaagaatttggtgtggacattggccctgtttgctttttataagccaaactctctgaaaccccagcaaaacaaaaaccacatccatgtgttcctcttgctttaatctcgtcaaccagtgaaagtgaccaactaaattccagttatttatttccaaacttttggaaaaagcataatttgacaaaaatagaatacaatttttttgctgtttcacccaccaatacagttcaaatgcttttgttttatttttttaccaattccaacttcataatgtctcaatggtgctataataaataaacatcaacacttttatgataaaaaaaaaaaaaaaaaaaaaaaaaaaaaaaaaa

SEQ ID NO: 601 - DNA, 3169 bp, Rattus norvegicus (Norway rat)
ccgcacgctgaaccggaggaactgcgcctagtcggggcgctgagggaccctccaccgggacgccggcccctccccgggcctctgctcacttgcccccctgcgagcccgtccccctagtcggcctctcggatcggggacgtggggcgagctgagagcaggcccggggtgggtggtcactgtggagaagacgtggctgtcaagatgatagaagtactgacaactgactctcagaaactgctacaccagctgaacaccctgttggaacaggagtccagatgtcagccaaaggtctgtggcctgaaactgattgagtctgcacatgataatggcctcaggatgactgcaagactccgggactttgaagtcaaagatctactgagtctaactcagttctttggcttcgacacagaaacattttcccttgctgtgaatttactggacagattcttgtctaaaatgaaggtacaggcgaagcatctcggctgtgtcggactgagctgcttttatttggctgtgaaatcgattgaagaggaaaggaacgtcccgctggcaactgatttgatccggataagtcagtataggttcacagtttcagacctgatgagaatggaaaagattgtgttggagaaagtgtgctggaaagtcaaagctactactgccttccaatttctgcagctctattactccctcattcgggagaccttgccatttgaaaggagaaacgatctgaattttgaaagactagaagcccaactgaaggcgtgccactgcaggatcatattttctaaggcaaagccttctgtgctggcgctggcaatcatcgctttggagatccaagcactgaagtatgtggagttaacagaaggagtagaatgtattcagaaacattccaagataagtggccgagatctgaccttctggcaagagcttgtttccaagtgtttaactgaatattcatcaaacaagtgttccaagccgaacggtcagaagttaaaatggatcgtgtctgggcgcactgcacgacaactgaagcacagttattacaggataacccacctcccaacaattcccgaaaccatgggttagttggcaaatctggttgttatcctctgtgtacagaacatttcccagtgagatcgtttttgtgctataacttaaggattgaaatactaccttcaatataaagaatacaggatgaaaacagtaaaggaaacgtgagtttgttggtctagacagagaatactgggaggcattcactgtgtaccgcagtctgaagagaaatgagtatcaaacctctagacacatgctcatactgctgtcaaaggactagcgtagaaaagagagtcctccaaaccggaagtttaaatgtagttactaaaatagcacttcttataacttacatatccccccactgtggcttatttaaagttacagaagtccaagcagaacgacaaaagatgtgacccatatatgaacacattttaatctgttcattgattaggagagtgaatatgaacttgcatgatgcccatgttaggtttctggaaactgccggggtatcttaattctctagtattctccctctgtggcagttgggctaatacaaagtaactatacgcatgagaatataaaatcagtctctgatacatacacatttttaccatcaaaatttcttaatcatagcaaagacttacctttttatgattaggaattttttttttaatgtatggcagcacatgcctttaatcccaacactagggaggcagaggcaggtggatctctttgagttcgaagccaggctggtctttacagtgagttccaggacagctggagagctacagaatggagagacgctgtctcaaaaacactcaaaacaaacaaacaaaccataccagtttgtaggcagacttctgttgggttgggtttgtactgtttgcctatgcagtgggattacagcagcagcaacaaaaactgtccctgaagtctttctctgccactgtgacctgagtttcctatggtacgcgatttactctaggaaacctcagcccctcaccacgttagctgttggcaaatggcctcacagttgcggaaagtcccaattctaggcttgggaaagcaatgcttagatttgaattggcccatgaagcattcaaatcaaggctaaagacataaatgtgaaataaaactgtgaaccttcattttaacattgatctcacttcccagatttaatcaatatatacttaggtggtattaaaaatggtaaactgcctaatttaaatctcaaaatttaaactatgaggtttacatcaaagccaacatttcacaaatgtactttttaaggtattaaaagaggtatttaagcagtaaatggtttcttggcacccataaccaagtaatagttaagttagaggtgggacttttttattgctatgagaattacatttaaacttttgggtgttttataaaaagcagatttcacaagttttgaaaattgtgacctttactgaaatttgttacctttaatatttcttctagaggataggtatttataaaagaaaaattcgtcagaattgctgcctcaatctagtcccatttgagaaaatttgtttctactgtctcaataactggatgaaatatcactctgaaaacttgcctattgcactaaagctagtttaggcttgataaaacactccaggaggtttttaccacagactgtttctattaaaactgctgcttctcatgtacaattttgttttaaaaggaaccgagtacatctgcaaaacctaagtcttaagggacgtcaggaggtaccttcagaattataggatcaccatggtagtggggattctccatgctggccttgaatgtttgatcttcactgctgaaatgtgggtagctcctcagcgccctgtagagcctgagtctacctagaatagctgtaaccattttgacaagtaatggataagaaaattatccattgagaagctaaaaacaaaacaaaacaaaaccaaagaacgggtgtattttattcttaacctttgtaaaccatcactgagaacacttcagttcttcctaacagctgttatgcttcgatttgaaaaaaatactgagtggataaccaactaccatcatgctttgggtacacctttcaataaaattactgaaatgc

SEQ ID NO: 602 - DNA, 1713 bp, Rattus norvegicus (Norway rat)
attcctgcgcctccgctccgtcccctgcggtctcctctgtgtgccatggacggcatcgtcccagacatagcagtcggtacaaagcggggatccgacgagctcttctccacgtgtgtcagcaacggccccttcatcatgagcagctcggcctcagcagccaacggaaatgatagcaagaagttcaaaggtgataacaggagcacaggagttcctaccagagtcatccatgtccgaaagctacctagtgatgtcactgagggcgaggtcatctccctggggctgccctttgggaaagttaccaacctccttatgctgaaggggaagaaccaggccttcattgaaatgagcacagaggaggctgccaacactatggttaactactacacatcggtggcgccagtgcttcgtggacagcccatctacatccagttctccaaccacaaggagctcaaaaccgacagctcgcccaaccaggcacgtgcccaggcagccctgcaggctgtgaactccgtacagtcaggaaacctggccttgcgagcctctgctgctgccgtggatgcaggaatggcaatggcaggccagagcccagtgctcaggatcattgtggagaaccttttctacccagtgacactggacgtgctgcaccagatcttctcgaagtttggcacagtcctgaagatcatcacgttcaccaagaacaaccagttccaggcgctgctgcagtatgctgaccctgtgagcgcccagcatgccaagctgtccctggatggccagaacatctacaatgcctgctgcacgctgcgcatcgacttctccaagctcaccagtctcaacgtcaaatacaacaacgacaagagccgagactacacacgccctgacctgccctctggagacagccagccatcactggatcagaccatggcagcagcctttggtgcgcccggcataatgtcagcctctccgtatgcaggagccgggttccctcccacctttgccatccctcaggccgcaggcctctctgttcctaatgtccatggagccctggcacccctagccataccctctgctgctgctgctgctgctgcagccggccgcattgccatcccagggctggcaggcgccgggaattccgtccttttggtcagcaacttgaaccctgagagagtcacaccccaaagcctctttattctcttcggcgtctacggtgatgtgcagcgggtgaagatcctgttcaacaagaaggagaacgcacttgtcgagatggcagacggcagccaggcccagctggccatgagccacctgaacgggcacaagctgcatgggaagtcagtgcgcatcaccctgtcaaagcaccagagtgtgcagctgcctcgtgagggacaggaggaccagggcctgaccaaggactatggcagctcaccgctgcaccgcttcaagaaacctggctccaagaactttcagaacatctttcctccctcagctaccctgcacctctccaacatcccgccctctgtgtcagaggatgacctcaagagcctcttctccagcaatggcggtgtggtcaaaggcttcaagttcttccagaaggaccgcaagatggcactgatccagatgggctctgtggaggaggcagtgcaggcactaattgagctgcacaaccatgacctgggcgagaaccaccacctgcgagtgtccttttccaagtccaccatc

SEQ ID NO: 603 - DNA, 966 bp, Rattus norvegicus (Norway rat)
  misc_feature (50)..(50): n
  misc_feature (58)..(58): n
  misc_feature (63)..(63): n
  misc_feature (625)..(625): n
ggcgtgaggaggttggagagttttttctgggacctaaacaaaggcacccncggccctnctaanctgaagttgagcctcacatatcctggaaaggaaaatgcccataccagaacccaagcctggagatctgattgagattttccgccctatgtacagtcactgggccatctatgttggtgatggatatgtgatccacctggctcccccaagtgaaatcccaggagctggggcagccagcatcatgtctgctttgacggacaaggccatagtgaagaaagagctgctgcgtgatgtggctgggaaggacaagtaccaggtcaacaacaagcacgacaaggagtacactccgctgcctctgaacaagatcatccagcgagctgaggagctggtggggcaggaggtgctgtacaggctgaccagtgagaactgtgagcacttcgtgaacgaactgcgttatggagtccctcggagtgaccaggtcagagataccgtcaaggtggcgaccgtcactggagtgggcttggcggccttgggcctcattggagtcatgctctcaagaaacaagaaacagaagcagtgagctgaatgactatccagctttagggctcttcttttgctagagggntggagtttgatttatagattctactgctttataattaggtatattttcacaatatacaataaaccacaagaagggaattttcatggagtacactgtagctatcttcagacacaccagaagagggcaccagatcccattacagatggttgtgagccatcatgtggttgctgggatttgaactcaggacctccggaagagcaatcagtgctcttaaccgctgagccacctctccagccctgaagggctctttcaaaggtttattctttctcctttcacaagtcggcatcgaaacttccaagtgtcctcaaagtccagggctccttggactccataacgtttct

SEQ ID NO: 604 - DNA, 1067 bp, Rattus norvegicus (Norway rat)
acggaggaccgtcagccagcaatcgcgtagctcgatcgatcacccaggaagagaaattgtaagcagataagaagaacgcgttcggtttgggacaccatttgcagctggaaatggggaatggactgtcagaccagacttccatcctatccagcctgccgtcctttcagtcctttcacattgttattctgggtttggactgtgctggaaagacaacagttttatacaggctgcagttcaacgaatttgtaaatactgtacctaccaaaggatttaacactgagaaaattaaggtaaccttgggcaattccaaaacagtcacttttcacttctgggatgtaggtggtcaagagaaattaagaccactgtggaagtcatatacccgatgcacagatggcattgtgtttgtggtggactctgttgatgttgagagaatggaagaagccaaaactgaacttcataaaataactaggatatcagaaaatcagggagtccctgtgcttattgttgctaacaaacaagacctgaggaactcactctctctctcagagatcgagaagttgttagcaatgggtgaactgagctcatcgactccttggcatttacagcccacctgtgcaatcataggagatgggctaaaggaaggacttgagaaactacatgatatgataattaaaagaagaaaaatgttgcggcaacagaaaaagaagagatgaatggcagtacttttatatcggtgtggaataggttttacttggtctgatttctgacaagctgaagagtgtctacagcctggtttgcctgtctgccctcacggatgctattaaagctttgttttgttgaacagtcagatacccaactctgttgccttgtggaagatgagtaaatgcaatgcttcttaaaggggtctcttctccgtgacccacaaatcttttggtactaccattttgggaagccaaaaaaggctagtaattgaccagaaaacaattttgtggaaatttgacctgaagttagtgaaataaaactttgaagagtgtaaaaaaaaaaaaaaaaaaaaaaaaaaaaaaaaa

SEQ ID NO: 605 - DNA, 2462 bp, Rattus norvegicus (Norway rat)
gtcgacccacgcgtccgaccaccttagctgccatcactgcacattggagcagctttctaaacaggtgccaccatgccagtgaagaagtacctgctgaagtgcctgcacaggctgcagaagggcccaggctacacctacaaggagctgctagtgtggtactgcaacaacaccaacacacacggccccaaacgcatcatctgcgaggggcccaagaagaaggccatgtggttcctgctcacgctgctcttcgcctgcctggtgtgctggcagtggggcgtcttcatccagacctacctgagctgggaggtcagcgtctcgctctccatgggcttcaagaccatgaacttcccagcagtcaccgtctgcaattccagccccttccagtactccaaggtcaagcacttgctgaaggacttgtacaagctgatggaggctgtcctggacaagattctggctccgaagtccagccacaccaacaccaccagtaccctgaactttaccatctggaaccacacgcccctggtccttattgatgagcggaaccctgaccatccagtggtcctcaacttgtttggggacagccacaacagcagcaacccagccccaggaagcacctgtaatgcccaagggtgcaaagtggccatgaggctgtgcagtgccaatgggaccgtgtgtaccttccgaaacttcaccagtgccacccaggccgtgactgagtggtacatcctgcaggccaccaacatcttctcacaagtgctcccccaggacctggtggggatgggctatgctcctgatcgcataatcctagcctgtctgtttggaacggagccctgcagtcatcggaacttcacacctatcttctaccctgattatggcaactgctacatcttcaactggggcatgacagagaaggcacttccttctgccaaccctgggactgaatttggtctcaagttgatcctggacattggtcaggaggactatgtccccttccttgcgtccacagcaggggctaggctgatgctccacgagcagaggacataccccttcattagagaagagggcatctatgccatggcaggaactgagacttctattggggtgctgctggacaagctgcagggcaagggggagccatacagtccctgcaccatgaacggctccgacgttgccattcagaacctctacagtgactacaacacgacctattccatccaggcctgccttcattcctgtttccaagaccacatgatccataactgcagctgtggtcactacttgtaccctttgcctgctggggagaaatactgcaacaacagagacttcccagactgggcctactgctacctaagcctacagatgagtgtggtccagagagagacctgcctcagcatgtgcaaggagtcctgcaacgacacccagtataagatgaccatctccatggctgactggccatccgaggcctctgaggattggatcctacatgtcctgtctcaggagcgggaccagagctcaaatatcaccctgagcaggaagggtattgtcaagctcaatatctacttccaagagttcaactaccgtaccatcgaggaatcgccggccaacaatatcgtgtggctgctctctaacctgggtggccagtttggcttctggatggggggctcggtgctgtgcctcattgagtttggggagatcattatcgacttcatttggatcactgtcatcaagctagtggcctcctgtaaaggcctgcgcaggaggcggccacagcgaccctacactggcccgccgcccactgtggccgagctggtggaggcccacaccaactgtgtcttccagcctgacacaaccagctgcaggcccaatgccgaggtctaccctgaccaacagactctgcccattccgggcactccacctcccaactatgactccctgaggctgcagccgctggacaccatggagtctgacagcgaggtggaggccatctagatccgcatccccacccgggaactagtgaactcaaaactgaggagtcacaaccattgtcagtgcctcatttcattagcccttgtccaaagagccagggcacagagcccatgtccctctggtcagccccaggctgaggggttcatagggtcaagatgctggtaccagaatattgaacttgtatccttttctagctcttgcccaccctagcccagtctttgctctctgttgacctagcagacaggctccagagacccatagagtccctctcctggtgataggccacttctctgtcttgttacaacctcagtctcccagaatcagtgaccttgccctagttggcattggctgaaccctgttaatagacttgggggtgtgcagaccatagggagggagcatcaggtaagaaggcttgacaggggagcacatgctttgttagaaaataaagagagaaaacaccgaaaaaaaaaaaaaaa

SEQ ID NO: 606 - DNA, 1969 bp, Rattus norvegicus (Norway rat)
agacgcttctgggtcgcgttagggagacgctctggtccggttgtgcgtgagaggaggagagcccagcgccacagcgacccggagagggatggcggccaccgggaccgcggccgctgcggccaccggcaagcttcttgtcctgctgctgctcgggctcacggcacccgcagcggctctggctggctatatcgaggctctcgcagccaatgctggaacaggctttgcggttgctgaacctcagattgcgatgttctgtgggaagctgaacatgcatgtgaacattcagactgggaagtgggagcctgacccaaccggcaccaagagctgcctgggaacaaaggaggaagttcttcagtactgccaggagatatatccagagctgcagatcacaaatgtgatggaagcaaaccagccagtcaatattgatagttggtgccgaagggacaaaaaacagtgcaggagtcacattgttataccattcaagtgtcttgtgggtgaatttgtaagtgatgttctgctagttccagaaaactgccagtttttccaccaagagcggatggaggtgtgtgagaagcatcagcggtggcacacagtcgtcaaggaggcatgtctgactgaggggatgaccttatatagctatggcatgctgctgccctgtggggtagaccagttccatggcactgagtatgtgtgctgccctcagacaaaggttgttgactctgactccactatgtccaaagaagaggaggaagaagaggaagaggatgaagaagaagactatgctcttgataaaagtgaatttcctaccgaagcagatctggaagacttcacagaagcagctgcagatgaggacgaggatgaggaggaggaggaggaggaggaaggggaggaagtggtagaagaccgtgattactactatgactcctttaaaggagatgattacaatgaggagaacccaactgaacccagcagcgatggcaccatctcagacaaggagattgctcacgatgttaaagctgtctgctcccaggaggccatgacggggccctgccgggccgtgatgcctcgttggtacttcgacctctccaagggaaagtgcgtacgctttatatatggcggctgcggcggcaacaggaacaattttgagtctgaggattattgtatggctgtgtgtaaaacgatgattcccccgactcccctgccaaccaatgatgtggacgtgtattttgagacgtcggctgatgacaatgagcacgcccgctttcagaaggctaaggagcagttggaaattcggcatcgcagccgaatggacagggtaaaaaaggagtgggaagaagcagaacttcaagccaagaacctccccaaggcagagcgacagaccctcattcagcatttccaagctatggttaaagccttagagaaggaagcagccagtgagaagcagcagcttgtggagacccatttggcccgagtagaagcaatgctgaatgaccgtcggcgcatagctctggaaaactacctggctgccctgcagtctgaccctcctcggccacatcgcattcttcaagctcttcgtcgttacgtccgtgctgagaacaaagatcgcctgcacaccattcgtcattaccaacatgtgttggctgttgacccagaaaaggctgcgcagatgaaatcccaggtgatgacacacctccatgtcattgaagaaagaaggaaccaaagtctctctctgctgtacaaagtgccttatgtggctcaagagattcaggaggaaattgatgagctccttcaggaacagcgagcagatatggaccagtttacctcctccatctcagagaaccctgtggatgtccgggtgagctctgaggaaagtgaggagatcccgccgttccaccctttccatcccttcccatccttgtctgagaacgaagacactcagccggagttgtaccacccaatgaaaaaagga

SEQ ID NO: 607 - DNA, 722 bp, Rattus norvegicus (Norway rat)
tcctttccgctcggccgttctcctgtacaggaggcagccatggcgcccagccggaatggcatgatcctgaagccccacttccacaaggactggcagcagcgagtggacacgtggttcaaccagccggcccgcaagatccgcagacgcaaggcccggcaggcgaaagcgcgccgcatcgcccctcgccccgcgtccggtcccatcagccccatcgtgaggtgccctacagttagataccacaccaaggtccgggctggcaggggcttcagcctggaggagctcagggtggctggtatccacaagaaaatggcacgcaccatcggcatctccgtggacccaaggaggcgaaacaaatccacggagtcactgcaggccaacgtgcagcgcctgaaggagtaccgctccaagctcatacttttccccaggaagccttctgctccgaagaagggagacagttctgctgaagaacttaaattggccacgcagctaacaggacctgtgatgcccatccggaatgtgtacaaaaaggagaaggccagagccatcacggaagaggagaagaactttaaggctttcgccagccttcgcatggcccgagccaatgcccggctcttcggcatccgagcaaagagggcgaaagaagccgcagagcaagacgttgagaagaagaaataatgcgcggctggagagttgtaataaattttccataaagcaaaaaaaaa

SEQ ID NO: 608 - DNA, 3628 bp, Rattus norvegicus (Norway rat)
gaattccattgggcatcgtgggcaaaacttccgaacgtcctctgcagagtctggtgtggaatgacactgggcgtgtagcaccctgaactggccatcttgtttcaggaagtggaagtcacagtctccctccaccgcatgctcgcctgttgcctcacagaacaatttgctaagggggttgaagggagaggttagaggagagagcaggttgaggaagtgtctcttggggttcttcagccacagcaagtatctccacggctgaatggacgacaacgacttttaagcagtattttcttacttacagaaaggagtccaagtgaagagagcaacatggtctctgcccagcttcacttcctgtgtcttctcacgctttatttgactggcgcatatggccaagaagggaagttcagcggccccctgaaacccatgacattctctatttttgaaggccaagaaccgagtcaaatcatattccagtttaaggccaaccctccagctgtgacttttgagctaacaggagagacggatggtatatttaagatagaaaaggatggacttctttatcacacaagagtcctggacagagaaacaagggcggttcatcatctgcagcttgcagccttggattctcagggagctatagtggatggcccagtccccatcatcatagaagtcaaggacatcaatgacaaccgacctacatttctccagacaaaatatgaaggctcagtgaggcagaactctcgcccaggaaagcctttcatgtatgtcaatgctacagacctggatgacccggctactcccaatggccagcttttttatcaaattgtcatccagcttcccaaaatcaacaatgttatgtacttccagatcgacaacaaaacaggggcaatctcgcttaccccagaaggttctcaggtattggatccaataaagaatccgtactacaacctggtggtctctgtgaaggacatggggggccagaatgagaattccttcagcgataccacatctgtggatattactgtcagagagaacatctggaaagcaccagagcctgtggagattcgagaaaacttaactgatcctcaccccatcaaaatcactcaggtgcagtggaatgacccaggggcccactattccttaatcaacaaggagaagctgccacagtttccattctcgatcgaccaagaaggaaatatttacgtgactcagcctttggaccgtgaggaaaaggactctcatgttttctttgccactgccaaggatgagaatggaaaaccccttgcatatccactggaaattcgtgtgaaagttattgacattaacgacaacccaccgacatgtctctctcaagtgactgtatttgaagtccaggagaatgaagtcttgggtagtagcattgggatctttgctgcccacgatatggatgaagctaacaatatcaacagtattttgaagtacagacttgtagaccaaacacccaaagttccctcagatgaactctttctcattgacgaatatggaggaaaggtccagttgggtaaacggtccttgaagaagcaagacagtcctcagtacaacttaacagtagaggtgtctgacatagatttcaagactctctgttctcttcaagtcaacgttattgatatcaacgatcagattcccatctttgaaagatcagactatggaagcaagactctttctgaagacacagccatcggatccaccatcttaatcatccaagctactgatgatgatgagccctttaccgggagctctaaaattctgtacaagattgtacagggagacactgagggaagactggaagttgtcacagatcccatgaccaatacaggatacgtcaagatcagaaagcctcttgattttgaaaccgaaccagttactagcattgtgttcaaagcagaaaaccctgagccgctggtgaatggcatagagtacaatgctagttcttttgcctccttcgagctgaccgtgacggatgtgaatgaagtgcctgtatttccccagcaaatattccaagccaacgttagcgaggatactgctataggcactaaagtgggcactgtgactgccagggatccggaaggcctgactgtgagttattcactgaaagacaataagagaggttggcttaaaatcgactccgtcaccggcgacatatttagcactgctccgctggacagggaaacagaaagtgtgtatcgagtacaagtggtggccactgaagtaggtgggtcctctctgagttctacagcatatttccacctggtcctcatggatgtgaatgacaacccccctcgcctagctaaggactacacaggcttgttcttctgccatcccctaagtgcccctgggagcctcatctttgaagccactgatgatgaccagcagtcagttcggaggcccaagtttacgtttgcccttggcagagaaagcttacaaagtgactgggaagtgtccaaaatcaatggcacacatgctagactctccaccaagcacacacgctttgaggaacaagtttatgacatcccaatcctcatcaatgatggggggcagccacccatggaaggcattgtctccttatcagttactttctgccagtgtgtggacggaagttgtttccggccagcaggcaaccaggttgggatacccaccgtgggcatggcagttggtatacttctgaccacatttctggtcattggtataattttagcggttgtattcatccgtatgaggaaagataaagttgaagatccacagtcccctgagaataagcctctgaggagctgaatttgaacagaaatgttcaaggttgtacaccaagcactgtatcaatgcctcagctgtttaatttcatccaaaatgtgaactataattggtagagtttatgcatcatgtgctatatctggtccccagctgtttaatctcataatttcatccaaaatgtgaactataatttctttgatggcatgccttcttgtcctgcaacacttaacgctacttagatattttatctctgtagacattagagttactctccattcccccataacattttgctcctttacaaaagcctacataacatgaactttcccttctggaaagaagatgaactaggtataaaccctgtgtgctgttgtttcagagacaagtctgttttctcccaactgacttttctaggctccacttatccctttctgtttccacctgcgccccctgatctcagcattacattaaatttaaaatgtgtcacacaaaagaacaaagtgaagtccttggggggggtgttgctaagtggacagccttattctttagcacaaacaacagcttctctgtgttgtcatctttaatagaggtcctccagcttggctatggtgtagaccctggggaggtatcaaatacaactgccgtgtttcaagaaagacctacttcatgaggcacaggaactgacgagctgtctgggtttactcactactccgtgcttacatacatgctgtacatgttttatttgtatattgaagttttgttatatatttatcatgtggaggaaagacgaaagcatgtacgtggtgaagaaatccaaaataaatgttggtttcaggaattc

SEQ ID NO: 609 - DNA, 2578 bp, Rattus norvegicus (Norway rat)
gatctggtgggatggggacatctttgtggagacacaggggggcaggggtgggaggaggtatgggatgtggaactgtctggagggtggaccgggaggggagtaaaatctggagtataaaaataaataaattaattaagaatactgttaattgaacaagtcctgaaaaaaaaaaaaagaaaaagaaacgggatggagatgtctctgtggttaagagtgcatactgctcttggagaggcctggagtttacttcccactatgtgtcaggtggcttagcgcgcgcgcgcgcgcgcgcgcgctcgcggtgtgtgtgtgtgtgtgtgtgtgtgtgtgtgtgtgtgtgtgtgtgtgtgtgtgtgtgtgcgtgtgtgtgttgtatatgagtagaatgaacctaagaccttgtgcatactggacaagctatcactgcattgtatccatattccacagagtttagcacccaggtatggcataataataataaatcttattgtaaattggagaaaggacagatttaggttcccttttacagaagcccaggaggcacagccttatttgaaagaaaaagcaactggcataaagtggtggattatgtcactttgtgtgatggtagtaatcacttaattatgtaaaccagagtatcctattgcacaccttaaatgtaggcaataaaagtaaaactttaagcagtaaaaaatactgtagaggccaccgccatgccatccagactgaggaagacccggaaattccggggccacgtgagccacagccacggtcgcattggtaagcaccgcaagcacccaggaggccgcgggaatgctggaggcacgcaattaccacaggatcaactttgacaaatatcatcctggttactttggcaaagtcggcatgagtcattaccacttgaagaggagccagagcttctgcccaactgtcaacctggataaattatggacgttggtcagccagcagacacgtgtcaatgcagcaaaaaacaagagtggagctgctcccatcattgatgtttttccaatcaggctactacaaagttctgaggaaggggaagcttcctaagcaacctgtcatcgtgaaggccaaattcttcagcagaagagctgaagagaagataaagggtgttggaggtgcctgttctggtggcttaaagtcacttcagaggttaattaaatgcaaacattttccatgaaaaaaaaatattgtagaaatgaattagcagttaagagcactggctgctcttccagagaatctcacctgtttgtaactctagttccacagcttctgagaccctcacacagacatacatggaggcaaaacagggttgaactataagataaaaaaccagtgtggtgtatatcccaagtgatgtctgtgagtggcattatgaccattctgttatcccgcattctctgctaaaagggctttgtatgcaaaaggtacctttattatatgagctaattacatgacttaattggtgagtaatcatggctaatattactatagcatgctaaaggaagtatcctaacaactgggaagatttactgtgtaaacattactttatttacaagtatatggtttaccttcactgctaaaactcagtctaagaatgcaatgatctttggataacatgatttactagattagccctgagtttagattgtatgttgaaactctctggggtatttgaaaaaaagaaaaaaaaagacagtaaatgagtgatatgggagggggtgccttagttggctcatgctgaggcacacctgcccacatctcccccttctcccctcccccgaggtaccagccatatatgggtctagtataaaagagagcttatttggaggcatgggaaagggggttgagaaggaagttgaggcagagaaagagaagtacagagagagagagaggaaagaaaggagaagaggcaggccaggaatatgtggagaggatgagagaggacttgagaggaaagagagagagggtaagagggactgagggagagggagagaaggagagaaggagagagggagagagagggagagagagagaggaaggttagagagcaaagagaggctagtcatttttatggcaagccaggctcttgtctggatgttgctatgtaacagttgggtagagccaagaaggaatgctaagaagctaactttgggtcccacccctggttagttacacagatttgtggtagtagaaagaggaagaacagttttcacttgtgtattttaacaggtcagggtccacaaagaagaaatattaaagcatatctagttgattggtcacttaggtatcagaagctcatgttgaattggcagctagcattataaaagtcctggacagcaagctcacaggagtctccctgagaaggctgccatggatccagtcctagtcctggtgctcactctctcctctctgcttctcctctcactctggagacagagctttgggagagggaagctccctcctggtccaacacctctcccaatcattggaaacacccttcagatatatatgaaggacatcggccaatcaataaaaaaggtaagtgttttttaag

SEQ ID NO: 610 - DNA, 443 bp, Rattus norvegicus (Norway rat)
caagatcatcgaagacctgagggctcagatctttgcgaattctgtggacaatgcccgcatcgtcttgcagatcgacaatgcccgtcttgccgctgatgactttagagtcaagtatgagacggaactggccatgcgccagtctgtggagagtgacattcatggactccgcaaggtggtggatgacaccaacatcacgaggttgcagctggagacagaaatcgaagcgctcaaggaggagctgctgttcatgaagaagaatcatgaggaggaagtccaaggcctggaagctcagattgccagttctgggttgactgtggaagtggatgctcccaaatctcaggacctcagcaagatcatggcggacatccgtgcccagtatgaacagctggctcagaagaaccgtgaggaactggacaagtactggtctcagcagattgaggaga

SEQ ID NO: 611 - DNA, 3276 bp, Rattus norvegicus (Norway rat)
cgaccgacctgcagttgagccgagttggaaatgtgaacgcaagaagcaggcttgatttttttttcctccccccctctcctagctctctcctcctctctctccctctcgcacccacactcacgcacacctccagcccgcacacagacgtgcacgcaccccccgccgcccggcagttatgtattctccgctctgtctcacccaggatgagtttcatcctttcattgaagcacttctgccccatgtccgcgccttcgcctacacatggttcaacctgcaggcccgaaagcggaaatacttcaaaaagcatgagaagcgcatgtcgaaagaagaggagagggctgtgaaggatgaactgctaagtgagaagcctgaggtcaagcaaaagtgggcttcccgacttctggccaagttacggaaagatatccgacccgagtaccgagaggattttgttcttacagttacagggaaaaaacctccatgctgtgttctttccaacccagaccagaaaggcaagatgcggagaattgactgcctccgccaggcagataaagtatggaggttggacctcgtcatggtgatcttgttcaaaggtattccgctggaaagtactgatggtgaacgccttgtgaagtccccacagtgctcgaatccagggctctgtgtccagccccatcacataggggtttctgtaaaggaactcgatttatatttggcatactttgtacatgcagcagattcaagtcaatctgaaagtcccagccaaccaagtgatgctgacattaaggaccagccagaaaatggacatttgggcttccaggacagcttcgtcacatcaggtgttttcagtgtgactgagctagtaagagtgtcacaaacaccaatagctgcaggaaccggccccaatttttctctctctgatttggaaagttcctcatactacagcatgagtccaggagcaatgaggaggtctctacccagcacatcctctaccagctctaccaagcgcctcaagtctgtggaggacgaaatggacagtcctggtgaagaaccattttacacaggccaagggcgctccccagggagtggcagccagtccagcggatggcatgaagtagagccaggcatgccatctccaaccactctgaagaagtctgagaagtctggtttcagcagcccctccccttcgcagacctcctccctcggaacagcattcacacagcatcaccgacctgtcataacaggaccgagagcaagcccacatgcgacgccatcgactctccactttccaacgtcacctatcatccagcagcctgggccttatttctcacacccagccatccgttaccaccctcaggagacgctgaaggagtttgtccaacttgtctgccccgatgctggtcagcaagctggacaggtggggttcctcaatcccaatggaagcagtcaaggcaaggtgcacaacccattcctccccaccccaatgttgccgccgccaccgccaccaccgatggccaggcctgtgcctctgcccatgccagacaccaagcctccaaccacatcaacagaaggcggtgcagcctcccccacctcaccgatcctggtacctgggataaaagttgcagcgtcccaccatcctccagacagaccacctgaccccttctcaactctgtaacatggacgcaacctcaacccggcgcagttacaacttcactgtcagtggaaggggagagacaccaactcgaatcaacttgtacatggaaacagcgaacgtcgtggtcaaacagcaaaggcccataacttttcgggattcttttttttttttaatactttagggactgtcgaattctctaaatatggtgctggaaatgcgttgggctgtgtgacatttgaagtgttccagtggtggtgtgagcagtaggtgaagcggctggtaggggatgagccttgctcacgaacttcctgttgtaacacttttgagcctggccttttcacagtatttcaagaatttgcccgcgcaggtgtgtgaccctcccggagcacttggagacacctggagaatgaaatctttcgtagtagctaagatctgtgatctgtaacttacaggacactcaagggcaatgtttttggggttttcttttttttctgtaacatattagaaaaagcaatgcagttaagttatctttcttttagtttggtttggttcagcagtcagcagttaaatacataacacaaccctcaaggacagtgaacccactcatgttgcagagcaatccaaaaagacagcaaagactactactactactctcagttcggttgtttgtttttttttttttttttttgtttttttattaagttttgaaatgctgcacttacatttaaaaaaaacattttcaacaatttcaacaatgacacaaaagttcacatggaaatggggaagatggtctgttttgacagaaactgacaggaatcaaaacaatcgaattttgaattgagtgaagtgcaatttcattggatagctaagtatctttgtaagatagagattgttgaaaattctatttttgtttttcaagtcctcccaccccaggactctaaattattggggttaaaaaaaaacagccttgcaagaaaaaggggagctatttttgctttttatgttttttattgttaaacttgtatccctttaaaaaaaaaaaccgaaggaaaatttaaaaaaaaagcaaaaaaaaaaaatacaaatctaatggtgcttttacctccaatatgttaactacattaaatgctaattaattattttctgttatcaaagcacataactcaaatgaaatcatggtatctgttaattttataagctagaaatcactataatgaattatgccaattctggaaaattttacacatgtatggcaacaccagatctatcggttttcaaacgcctcgtcgtaaccagacattgtccagaagtttcaaagacccttcgcaaaccctgaatcggctacgggaaatatatcagatcgataaggacataactgtgtgagccattcagatcaaagtacttgttaggaaaataaacaaacaaacaaaaacaaaatgttcacacacacacacaccccaaatgtcttgtatcttatgtttaaggaaaaagaaaagacaaaacggcacgagggtctgaccaccatgacaacctacagcaacaaggaccaaagctgagagaggcgtctcattcactcgtgaccttctggtggcaccgagcaggctgctctcttgcacagatggttg

SEQ ID NO: 612 - DNA, 1907 bp, Rattus leucopus (mottle-tailed rat)
ccacgcgtccgcgaacctactgaacactccaccggcggcggctcggttccccgccagccgcccagcgcgcagacggggcttgatgtccaggttgtcagcgcagctggcgactcaggtaccatgagccaggacaccgaagtggacatgaaagatgtggagctgaacgagctggaaccggagaagcagcctatgaatgcagcggacggggcggcagccggggagaagaacggtctggtgaagattaaggtggccgaagacgaggcggaagccggggtcaagttcacaggcttatccaaggaggagctattgaaggtagctggcagcccgggctgggtgcgcacccgctgggcgctgctgctgctcttctggctcggttggctgggtatgctggcgggcgccgtggttatcatcgttcgggcgccacgctgccgtgagctgccggtacagagatggtggcacaagggcgccctctaccgcatcggcgaccttcaggccttcgtaggcccggaagcgagaggcatagctggtctgaagaaccatctggagtacttgagcaccctgaaggtgaagggcctagttttgggcccaattcacaagaaccagaaggatgaagtcaatgaaaccgacttgaaacagattgatcccgatttaggctcccaggaagattttaaagaccttctacaaagtgccaagaaaaagagcattcacatcattttggacctcactcccaactataagggccagaatgcatggttcctccctcctcaggctgacattgtagccaccaaaatgaaggaggctctgagttcttggttgcaggacggtgtggatgggttccaagttcgggatgtgggaaagctggcgaatgcatccttgtacttggctgagtggcagaatatcaccaagaacttcagtgaggacaggcttttgattgcagggaccgcgtcctctgacctgcaacaaattgtcaacatacttgaatccaccagcgatctgctgctgaccagctcatacctgtcacagcccgttttcactggggagcatgcagaactcctagtgattaagtatttgaatgccactggcagccgctggtgcagctggagtgtgtcgcaggcaggactcctgacatcctttataccggctcagtttctccgactctaccagctgctgctcttcactctgccaggaactcctgttttcagctatggggatgagcttggccttcaggcagttgcccttcctggacagcctatggaggctccattcatgctgtggaatgagtctagcaactcccaaacctcaagtcctgtaagcctcaacatgacagtgaagggccaaaatgaagaccccggctccctcctcacccagttccggcgactgagtgacctccgtggtaaggagcgctctctgttacacggtgactttgatgcactgtcttcctcatctggcctcttctcctacgtccgccactgggaccagaatgagcgttacctggtggtgctcaacttccaggatgtgggcctgtcagccagggtaggagcctccaacctccctgctggcataagcctgccagccagtgctaaccttttgcttagtactgacagcacccggctaagccgtgaggagggcacctccctgagcctggaaaacctgagcctgaatccttatgagggcttgttgttacagttcccttttgtggcctgatccctctacacagaacctgccacccttctttcctctctcaggcctttggaattctggtctttctctccttattttgtttttgtttttaaacttttgcagattacatatgaattcttacactgggtgtttttgtcttcaaaataaaaaaaatcccccctgcaaaaaaaaaaaaaaaaaaaaaaaaaaaaaaaaaaaaaaaaaaa

SEQ ID NO: 613 - DNA, 2509 bp, Rattus norvegicus (Norway rat)
ccatagcgaagacttcatgaagactgtcccaggcatgctgtgacacaaactacagaaggtgggaaaagatctttgtggtcaaaccatccggaccttggctaccgagacagaacaatactgaccgcattcactcatacacagttctcggcacctcccagtgctcagagcagaccctcaaggagatgagcagatccaggatggggagcccaatgcaccgagtgtccctgggggaccactggagctggcaagtgcacccggacatagacagcgaaaggcactcaccgtccttcagtgtggagcgacttaccaacatccttgatggaggcctcccaaacaccgtgctgcgaagaaaagtcgaaagcatcatacaaagtgacccagtgtttaatttgaagaagctttacttcatgacccgagaggagctatatgaggatgcgattcaaaagagattccatctcgagaagctagcctggagcctgggctggtcagaagatggtcctgaacgcatttatgctaacagagtccttgatggaaacgtcaacttaagcttacatggtgttgccatgaatgctatccgaagcctgggctcagatgaacagattgctaaatggggccaactctgcaaaaacttccaaatcatcacaacatacgcccagacagagctgggacacgggacatacctacagggcctggagactgaagccacctatgatgaagccaggcaggagcttgtgatacacagccctacgatgacttccaccaagtggtggcctggggacttgggatggtcggtcacccatgctgtggtcctagcccagttgacctgcttaggagtccggcacggcatgcacgccttcattgtgcccattcggagcctagaggatcacaccccactgccaggaatcacagttggggacataggccccaagatgggtttggaacacatagacaatggcttcctgcaactgaaccacgtgcgggttcccagagaaaacatgctcagtcgctttgcagaggtcttgccagatggtacctaccagaggcttgggacgccacagagcaattatcttggcatgttggtgacccgggtgcagctgctgtgtaaaggaatcctaccctccctccagaaggcttgcatcattgccacgcgctactcagtaatccgccatcagtctcgacttcggcccagtgacccagaggcaaaaatcctggaataccagacgcagcagcagaaactccttcctcagcttgctgtgagctatgccttccacttcacggccaccagcctctcagaattcttccacagctcctacagtgctattctgaagagagacttcagcctcctgcctgagctccatgcattgagcactggtatgaaggccacgtttgcagacttctgtgcccagggcgccgagatctgtcgcagagcttgcgggggccatggctactcaaagctgagcggcctgccgacactggttgctcgagcaacagcctcttgcacatatgagggtgagaatacggtgctctacctgcaagtggccaggtttctgatgaagagctatctgcaggctcaagcgtccccaggcgccacaccacagaagcctctccctcagtccgtcatgtatattgccacacaaaggccagccaggtgctcagcccagactgcagctgacttccgctgcccagatgtctataccacagcctgggcatatgtgtctaccaggctcataagagatgcagcacaccgtacacagaccctcatgaagtccggggttgaccagcatgatgcctggaatcaaactactgtcatccaccttcaggctgctaaggctcactgctacttcatcactgtgaagaatttcaaggaagctgtggagaaactagacaaggaaccagagattcagcgtgtgctccaacgcctctgtgacctctatgccttacacggtgttctgactaactcaggggactttctgcatgatggcttcctgtctggggcccaggtggacatggccagagaagccttcctagacctgcttcccttgatccggaaggatgccatcttgttaaccgatgcttttgacttctcggaccattgtttaaactcggcacttggctgttatgatggacacgtctacgaacgcctgtttgagtgggctcagaagtacccagccaatactcaggagaaccctgcctataagaagtatatccgaccactgatgctcggctggagacacaagatgtgaaaagtcaaaggatttgggaccgagaagcaccacggccttactatggcacatatacatagagaatttaaagcacggggggggggggggggggggtgctgctcggttaaatcaggtagtaaattggtacatgaatggatggtcatcctattagtctactattgagcatgtttgaaactttcccttgtccatctatagcatgtatttggctaaatgctaaaatttttgttttacatacaggaaaagctaataaacttgtcagttacaaa

SEQ ID NO: 614 - DNA, 3548 bp, Rattus norvegicus (Norway rat)
gttacaaggttgtcgaggtgcttgccctcacctgctgaaccatcccaccctgggcagcacttcctgattattaaggcttgtgaaacacctgcctaggtgttcaaatggcgctttacaagcaatctatatgaggcgatagaatcttttgaaatagaaatgacctgtttcctttattttactgtattcctaatatacgtcttattttaatctaaatagccacttgtgtctaatagcaataggaaatgaaacttgacctcaagaagcctatttccagaatgtcaggaaccagtgacaaaacttgtttcccaaatgtaattttctgagcctgcggcatcatgttatctttaaaaaggactaaagggtgcatcatactgctattttgagcacaaaagagcagccttctctgaggcccacacctctgtacacttcgatactaacattccggtaaggcaaagctcttagaagtatctaaagggataccccaggctagtaaggaatgtttcctgcccaaagattacccaatagcttcgttttggtgtcctaagagggaaattcaatacaaattccgattcatcagcaatttcttccagtttctcctacaattcaagttcctacgacttaagtgaaagctttatttttttaaacaccagaaagagttccaatttgcaagttggggaaaatggtgcaaaatttatacaaacactgaagaagaccgtgtcgcatgggcaagctaaatgcatgattaccggtccgacagctgagcaccctcccaccagccttctcctgcagtcttcctggctgctggcttcaaaactccctaggaaaaagcctgagatgtcaatcttatgaccttgatattttcctggctggtttttaaccaccatcaccggcctacatactcagaaataacagacaatctgacaactttcttttcatgctaaactttgataaaaacagccacagtcctgggaaggtgagccacttccaagacatacatcaatttgaccagagacaacacaaccagtccccggcaagccacgcccatggggggaggggcttggactgcgcgtgcgtgctggttccattccaaatcctggccccctggaaaaccggactagaaaagctgtcccgctgcctcccagctgcagagtttaccccaggttctttggtctccgacggcctttctacgcacacgcagccatgtcttccgacagacccgtggcactggtgactggtgctaacaaaggaatcggattcgcgatcgtacgtgatctctgtcgtaaattcttgggggacgtggtcctcacggcgcgggacgagtcacggggccacgaggcggtgaagcagctgcagaccgagggcctgagcccacgcttccaccagctggacatcgacaacccgcagagcatccgcgcgctgcgtgactttctgcttcaggagtacggaggactgaacgtgctggtcaacaatgcgggcatcgccttcaaaggtaagccacagggtgtggtgacttgcccaaagcctgggaccagagtggactgtgcctctctggggagcattactaggatcagaagtactatgatgtaggactctgaaacagatcccctaggagaaacgctgcagggtagcggctgcaggcctccaggaaagcagagccttaatggtcgccatcatttccaggttcccctcaagcggttgttgagtaattgggcttagcaatacttaagttgaattatatctagtaaataaacaagagattgaggggagagagacagggggaaaagtgttacattacgatcctgatacacaaccttcactcagcctcccccagtggtggtgtgtttcaaaaacaatagaacattgtcagatacacaatggggcagtgctgcaactaaacacagaagtacttggaagtggatttctaatgctctggaactgtccgcccagctaactctgttctctttccctctgaaagttgttgaccccacccccttccacattcaagcagaggtgacaatgaaaaccaacttttttggtacccaagatgtctgcaaggagctactccctataataaaaccccaaggtgagtctggcccagctcctctccctctctgcacctgcctctctgccacttggaggtgtggctctgctccttggggtctgatcttttgtagccattgtcgctatctttgcatacccagctcttctttaacctttcagtatgattccaaggtcccttggttccacctcctaacccctgagggggttttaggattccaattatctcaatacacttcacatacatactgacatcacactgctcacaatagcctgtccccacaagtccccaggttggacccaagtgcctccctcagctcagtctcacagcaggtctcagctgtcaagctgcactcctgcaaaccctgagggggcctcctttctgcagcagccttttttcctgggcttctacacctcttacagaacccttcccctcctaaaaatcttttaggaagtagatcaggtctttagcttggttcacaggactctgtaatctgaccttccttcctctgggctcatgttagcgccccatcaacaagcttcacctttctgcaaaacaagctatcacatgactttcgtcgtgaagtgctgtaacacccccaaatctctggatagcatatgaaccactgctcattaaatacacaccagtaaagacaagtgagctgctttggaaatgtgagtctctggtacagagttgactaagtgtagctctctcaagactcctctctccagaatgccctctggaccagacctcatggtcatctggcttcgctacccacccaaaccttgacggcgagacagcagattctgtgctatttgagtccttttctgtgcatccctgtctcaactgaaatcttggggatctaatgtctcaccgtttgtaaagtgttgctcccgtgtccgcatctctacatgatgatgtgttttcaggcagagtggtgaatgtatcaagcagcgtgagtctcagggccctgaaaagctgcagcccggagctgcagcagaagtttcgaagtgagaccatcactgaggaagagctggtggggctcatgaacaagtttatagaggatgcaaagaaaggagtccatgcgaaagaaggctggcccaatagtgcatatggggtcaccaagataggggtgacagtcctgtccagaatctatgccaggaaactcaatgaggagaggagagaggacaagatcctcctgaatgcctgctgccctgggtgggtcagaaccgacatggcaggaccaaaagccaccaaaagcccagaagaaggagcagagacccccgtgtacttggcccttttgcctccaggtgcagaggggcctcacgggcagtttgttcaagataaaaaagttgaaccatggtgaatccaactctcacccccaccccttctatcctgacttggtgaaagccaagggacatttataatataccatcacttctggaaaaataaacataactaagtctttaagcacacaacaggtgtttgc

SEQ ID NO: 615 - DNA, 1780 bp, Rattus norvegicus (Norway rat)
gccttcagtttcctgtactaagtgcttctgcccaccagagcaaccgattctaaggcctggctctagcaatggccttcgcaaatctgcgcaaaatactcatcagtgatagcctcgacccctgctgccggaagatcctgcaagatggagggctgcaggtggtggagaagcagaacttgagcaaggaggagctgatagccgaactccaggactgtgaaggccttatcgtccggtcagctactaaggtcactgctgatgtcatcaatgcagcagagaagctccaggtggtgggcagggctggtacaggcgtggacaatgtggatctggaggctgccacaaggaagggcgtcctcgtcatgaacacccccaatggaaatagcctcagtgctgcggaactcacctgtgggatgctcatgtgcctggccaggcagatcccccaggcgacggcttcgatgaaagatggcaaatgggaccggaagaagttcatggggacagagctgaacgggaagacactgggaattcttggcctgggcagaattggaagagaggtggccgcccgaatgcaggcctttggaatgaagactgtaggctatgaccccatcatttctccagaagtcgctgcctcctttggtgttcagcagctgccgctagaggagatctggcctctctgtgatttcatcactgtccataccccgctcctgccctccactacaggcttgctcaatgacagcacctttgcccagtgcaagaaaggcgtgcgggtggtgaactgtgctcgaggaggcattgtggatgaaggtgccctgctccgtgccctgcagtctggtcagtgtgctggtgctgcactggatgtgtttacagaagagccaccacgggaccgggccttagtggaccacgagaacgtcatcagctgtccccacctgggcgccagcaccaaggaggcccagagccgctgtggggaggaaatcgcagtccagtttgtggacatggtgaaggggaaatctctaacaggggttgtaaacgcccaggctcttaccagtgccttctctccacacaccaagccttggattggtctggcagaagcattgggcacgctgatgcacgcctgggctggctcccctaaagggaccatccaggtggtgacacaaggaacatctctgaagaatgctgggacctgcctgagccctgcggtcattgtcggccttctgagagaagcatcaaaacaggcagatgtgaacttggtgaacgctaagctactggtgaaagaggctggcctcaatgtcaccacctcccacagtcctggtgtcccaggagagcagggcatcggggaatgcctcctgactgtggccttggcaggtgccccctaccaagctgtgggcttggtccagggcaccacaccaatgttgcagatgctcaacggagctgtcttcaggccagaggtgcctctacgcaggggccagcccctgctcctgttccgggctcagccctccgaccctgtcatgctgcccactatgatcggcctactggcagaggcgggggtacagctgctgtcctaccagacctccaaggtgtctgacggagacacttggcacgtcatgggcctctcctccctactgcccagcctggacgcatggaagcagcatgtttctgaggctttccagttctgcttctgacccaggggctcagcggtcccagcccctcaggctcttctgaggaaacccgctcactgtgacctgaactaatatctagtaaagaatctaactccaaaaaaaaaaaaaaaaaa

SEQ ID NO: 616 - DNA, 140 bp, Rattus norvegicus (rat)
ctatgatcggcctactggcagaggcgggggtacagctgctgtcctaccagacctccaaggtgtctgacggagacacttggcacgtcatgggcctctcctccctactgcccagcctggacgcatggaagcagcatgtttct

SEQ ID NO: 617 - DNA, 7225 bp, Rattus norvegicus (Norway rat)
aagcttcttcccagaacctggaagcccagcaagcaaatgccctgcccccacccgacctccgccctcgttggcttcgcaaagctgtgatctgtggccagtagagggcacactttactttcgcaaatctgagagccacaacccgggggagggggcggggaaagagtctctgcagcaaaatgcagcctagggattggtggctcttggcgtttgaggcaaaatcctagaggctgtagtcattttgcaatccttaaagctgaattgtgcaatgagctcgatgaaggaagatactatcatccaacagctgaatcctaaattgcaaactcaatggctaatgactactttgaacaatgcgcaccttacacacgctacacgctactgtagtctcttctttttttagggggtagcagtgagaggtttcttaaaatgccttggggcgaggagtcctgaatgaggagactgctttgggttttgatgcgtaggataagcaaatcccgaggaaatatgcactatataataaatctagaaccaaaacacagagcaaaagattcatgtttcacgttggttaataaactaggttatcgtgtatatattaagtgtgtatacctttggggactctacaaaatgcacggcatggtattgaggaaaaagtaaattgggaaattagtgtaaaaattagagtcggcttttaattagtttaacacacacatacgaaggcaaagacacaacgttactttgatctgaccggggccgacctttttttaagtgcataattacgattccagtaataaaaggggaaagtttggggtttgtcctgagaggaaggggttaacggtttcctttattctagggtctccgcaggctccccagatctgggttggcaattctactcctccccctttctgggaagtccgggtttcccccaacccccaatccatggcatattctcgcgtctagcgccttgattcccgcccccccacacccccaacctctaagccggagtctggtgcaaactggctccacaggggcaaagaggatttgcctttagtggaaactggctgtggaactggaactctgagtggaggtgcatggggtgtagactggcagagactcgaccgggaggatccgggtagagcgcgcccaccgccgcagtcctactctactccagctctggaacgcgcagaaagacctacggggcaaggagccgcctccaccccaccccgcctggtggaaggtccgaacgggaggtgttggagtggagggcctttctggcagcaaattgggggattcattctgtaaagaatgtgcccagtcaacatagctgtacgcccaaacgcaaaatacacactgccctccccgagagatgcagtggctgtttattcctaagtggctctccaagtatacgtggcattgagttgctgagcaattttaatgattccaggcatcgtttttctgctcagacctcatctgtcgtaggtcttcaactatcactccacactgagcaagggctcctacataactctttttttttttcgtccttccctttttaaattctgtttccccgaccttagagagacgactggccgcccgagacgtgcgtgacgcggctcagggtacacggcgtattgtgtggagcgaggcagctgttccacctgcggtgactaatacacgcaggacaagaacacagttcagccgagcgctgcgcccgaacaactgtacagaaagggaaaggaccgacgcgcgagcaggagaaaatggtcgggcgcgcagttaattcatgctgcgctattactgtttacaccccgagtcggagtactgggctgcgggactgaggctcctcctctttccccggctccccactagtgcccctcccgagttcccaaagcagagggcgggggagcgagaggaggaaaaaaatagaggtcgggaggggagggagaaagagattctctggcctaatccccgcccacccgccctttataatccgggggtctgcgcggctaaggacccccgggctgcgctgctctccgctgccgcctccgccgcgcccactccgctcgcctcctgcctccaaaagggcaggcgttcgccgaggcttggcgggaaaaagaagcgaggggagggatccggagtcgcagtataaaagaagcttttcgggcgttttttttctgactcgctgtagtaattccagcgagagacagagggagtgagcgggcgggttggaagagcccagtgtgcagagccccactccgggcttcctaggaaggcagctctggagtgagaagggctttgcctccaggcttgctgcctcctcgacccaatcctcccgctgacccaacatcagcggtcgcaaccctcgccgcctctgggaaactttgcccattgcaacgggcagacacttctcactggaacttacaatctgcgagccaggacaggactccccaggcgcaggggagggaatttttgtctatttggggacagtgttctctgcctctgcccgcgatcggctcccctgaaaagagctcctcgcgttatttgaagcctgaatttcctttgggaggtggaaaacccggtaagcacagatctgttggtcttctactgttttctctacgtcctgagtgtagcgaccggttagaacagtctttattcaatttctgtgcttttgacactttactcagagtagttggggtaggccggggcggagttggggtggatctgagtcggggtagaacgacttgtcaagatgacaggaaaggggaaggaaaaaaccggggtgcattttgaaactgtcttccagaggttaccgtgggctgacgctgacccgggccggttggacattcttgctgtgctacattaattgatatttatgtcctttggggggggggtgtcaaagccggaggtctcttcgcggtggccaaaggaagcccttcgtatcctgaggtctttgggaaagggattaccttttgcgtgttctccgcaaaaagcgagaaggctccgtagcctctgacttcccagtctttgggagggcatttaaatttcggcttggtgcatttctgacagcctgagaccaactcgggggtgcgtcccgcccgccaatccccggcggcgattgcaaccggtccctgatccttttaagaagttgccattgggctttaaaaatagtgatcatagtaaaatttaagcctaaccctccgcggtattaggacttggtgttggactagcgcactgaggagaggcaaaactggggcagggatgtgacagattcgttgacttggggaaaaccagagggaatcctcacattcctggttgggatccgcgggtattccccgcgcccctgaattgctagggagactgcggtgagtcttgatctgagctgttcggtaacagctgctaccctcggcggggagagggaagacgccctgcaccgggtgctgaatcgctgtggggtctctggcgcagtggcgtcgcggtttagagtgtagcagggaggtgtctcttattatttgacaccccctcccctttggagaggcttgttagagcctgagactgagctctcccctccaagtcagcaataggaaagaaaagccggcaaaggaaggaaggggggcgcgctgggggtggagaaagaggagggcggagaggggcggcggcgccggctgggtaagagccgggcgacggcgcgagtagggacccggacccggtcggcggcgcaaagagccggcaccggagggggccgagcaccgcggcgcctctcgcctttctccttcaggtggcgcaaaactttgcgcctaggcttttggcagactgtattccctacagtcgcctccctcagcctctgaaggaggccaaggccgatggcgattcctgggcgtctgcagtgctaagtccctgctctaaggaggcggggactccgagcagctgctagtccgaccagcgtcactgatagtagggagtaaaagagtgcattccccccaaccacacacacacacacacacacacacacacacacacacacacacacacacacacttggaagtacagcaggctgaaaggggagtggttcaggattggggtacgcgctgcgccaggtttccgcatcaaccagagctgggtaactctagacttgcttcccttgctgtgccccctccaacagacagtcacgacgatgcccctcaacgtgagcttcgctaacaggaactatgacctcgactacgactcggtgcagccctatttcatctgcgacgaggaagagaatttctatcaccagcaacagcagagcgagctgcagccgcccgcacccagtgaggatatctggaagaaattcgagctgctgcccaccccgcccctgtcccccagccgccgctccgggctctgctctccgtcctatgtcgcggtcgctacgtccttctccccaagggaggacgatgacggtggcggtggcaacttctccaccgccgatcagctggagatgatgaccgagctacttggaggagacatggtgaatcagagcttcatctgcgatcctgacgatgagaccttcatcaagaacatcatcatccaggactgtatgtggagcggcttctcggccgctgccaaactggtctccgagaagctggcctcttaccaggctgcgcgcaaagacagcaccagcctgagccccgcccgcgggcacagcgtctgctccacctccagcctgtacctgcaggacctcaccgccgcagcgtccgagtgcatcgacccctcagtggtcttcccctacccgctcaacgacagcagctcgcccaaatcctgtacctcgtccgattccacggccttctcttcttcctcggactcgctgctgtcctccgagtcctccccacgggccacccctgagcccctagtgctgcatgaagagacaccgcccaccaccagcagcgactctggtaagccgccccaaccccagcagggtaggaagccagaggttggatggacctccttctcattggcattaattcaattggcccccgggctcaccctttctttcccttcggtctaagctcttcatccctggactcctgtgcttcagatatccctccccttcccccagaccgccctggttgtcagccccacccccacccttcccacccctcaggaatttcatttgggtttttaaatcttctggcttatctttcaactcaatccactccctttacccctcctaggcattttaattacccagagaagggtgtgaaggaggatagggaactgatcctgagaagagtgaatgaattacctgcttttctttgacttcagaagaatatttgaatttaatgtctacaagacccaagagaagcaatgacagaagcaggacagcctttagcctcagagccaggcactagtgaaagatcctgaagagttgaagagctgttttccctccatcccgttttgaacacttcaaagcaaatcctcttcagtttggattttcgtaccccctccctccccaaatgctcgccccaccactgccaccaccaggacaggacgtttggcaaaaccacaagactttactattgcacttccagtaatatagggagttggtaaagtcatagcaagatatttgcagctatcgcctacaggacctgaagggttcttggtgaagtcccttaaaaatgggaggtgcttgggaatgtgctttgctttgggtgtgtctgaagcctcattaagtcttaggtaagaattggcaacgatgccatatcctggtacatggtaattttctcacctgtgccctaaccctgttctacctttctgggaaacgggaggatggtgtctagatctggttcttacttctcaatcctttccaacttggcacttggatagcatcggtcaaacccccatctgggattcaggaggcattgctaactaatcttccacttccttccttacagaagaagaacaagatgatgaggaagaaattgatgtggtgtctgtggaaaagaggcaaccccctgccaagaggtccgagtcagggtcatccccatcaagaggccacagcaaacctccacacagcccactggtcctcaagaggtgccatgtctctactcaccagcacaattatgcagcacccccctccacaaggaaggactatccagctgccaagagggccaagttggacagtggcagggtcctgaaacagatcagcaacaaccgcaaatgctccagccccaggtcctcagacaccgaggaaaacgacaagaggcggacacacaacgtcttggaacgtcagaggagaaacgagctgaagcgtagcttttttgccctgcgcgaccagatccctgagttggaaaacaacgaaaaggcccccaaggtagttatcctcaaaaaagccaccgcctacatcctgtccgttcaagcagatgagcacaaactcatctcagaaaaggacttactgaggaaacggcgagaacagttgaaacacaaactcgaacagcttcgaaactctggtgcataaactgaccggaagtgaggaggagctggaatctcgagtgtaaggagaacggttccttctgacagaacttggacttcaaaaaatgcatgctcaaagcctaacctcacaaccttggctggggctttgggacttcagccataatgttaactgcctcaaagttaaggcataaaagaacttttttttatgcttcccatcttctttctttttcctttaacagatttgtatttaattgttttttttaaaaaaatcttccggtgtacatagggcctttaaatgtaaataactttaataaaacgtttataacagttatacaagattttaagacatgtatgataaaccataattttttttatttaaagaccttttcatttttaaagttgatttttttctattgtttttagaaaaaataaaataattggaaaaaatataattgagccaactcttaaatggtgttttcttttttttttttcctccaatttctcttcctcaactatagatgaacagaactgaccgtcttcccaggacgggtttacaagggtgggaaggggttatcttaaaatggggcgggggaggggggtgcctcaagacctctaagttcccagtgttatgagatcctttctgtggatgctgataggatgagagttgagaaagggcaaaaggcaagtgaggttagatacaaggaacagggaagcaagaggttaaagatagcagacagggaagagatggcagaatgaatctcctgcagtt

SEQ ID NO: 618 - DNA, 292 bp, Rattus norvegicus (rat)
gaaactctggtgcataaactgaccggaagtgaggaggagctggaatctcgagtgtaaggagaacggttccttctgacagaacttggacttcaaaaaatgcatgctcaaagcctaacctcacaaccttggctggggctttgggacttcagccataatgttaactgcctcaaagttaaggcataaaagaacttttttttatgcttcccatcttctttctttttcctttaacagatttgtatttaattgttttttttaaaaaaatcttccggtgtacatagggcctttaaatgta

SEQ ID NO: 619 - DNA, 1662 bp, Rattus norvegicus (Norway rat)
cattcagtttagtcagaatccatgggtgggctcagctgtctcctccgtacctagtctgcggttatggcttcgctcacggtgaaggcctatctactgggcaaggaggaggcggcccgcgagatccgccgcttcagcttctgcttcagcccggagccggaggcggaagccgcggctggcccggggccctgcgagaggctgctgagccgggtggctgtgctgttccccgcgctgcggcctggaggctttcaggcgcactaccgcgatgaggatggggacttggtcgccttctccagtgatgaggaactgacaatggccatgtcctatgtgaaagatgacatcttccgcatctacattaaagagaagaaggagtgccggcgggaacatcgccccccatgtgctcaggaggcacgaagcatggtgcaccccaacgtgatttgtgatggttgcaatgggcctgtggtgggaactcgctataagtgcagtgtgtgccccgactacgacctgtgcagcgtctgcgaggggaagggcctgcacagggagcacagcaagctcatctttcccaacccctttggccacctctctgatagcttctctcatagccgctggcttcggaagctgaaacatgggcactttggctggcctggctgggagatgggcccaccagggaactggagcccacgtcctcctcgcgcaggggatggtcgcccttgccccacagctgagtcggcttctgctccatcagaggatcccaatgtcaatttcctgaagaatgtgggggagagcgtggcagctgccctcagccctctaggcatcgaggttgacattgatgtggaacatggagggaagagaagccgcctgacacccacctctgcagaaagttccagcacaggcacagaagataagagtggtactcagccaagcagctgctcttcggaagtcagcaaacctgacggggccggggagggccctgctcagtctctgacagagcagatgaagaagatagccttggagtcggtgggacagccagaggaactgatggagtcggataactgctcaggaggggatgacgactggacgcatttgtcttctaaagaagtggacccatccacaggtgaactccagtctctacagatgccagaatcggaagggccaagctctctagacccctcacaggaaggccccacagggctgaaggaagctgccctgtacccacatctcccaccagaggctgatccccggctgattgagtcactctctcagatgctgtccatgggtttctcggatgaaggcggctggctcaccaggctcctacagaccaagaattatgacatcggggctgctctggacacgatccagtattcaaagcaccctccaccattgtgacagtgctgtggccaagtcccacaacccacctcccttgtcttctagttgcatcatgtagagtagcagggcttctaaggcccagtgtcttggcattcttctagaaccttcaggtgggactgtgaggccttcttaggcagtaggaaagtgcatgagaagagagtctgagtgtgcacatgctgacccctgagcacagatccaagcagctgtggctgggcttmcgctgctttccctcggcctggcctttgccagggagctgtggagtcatgctgcactccactt

SEQ ID NO: 620 - DNA, 1711 bp, Rattus norvegicus (Norway rat)
cgggcctacggctcagtctaaggactgcaaataggcagctggccactagaggatctctaacttttcctacgaaactgagggctgaagtcaaagatacaaaatggtggcctcgtctttcgctgtcctgagagcaagcaggttgtgccaatggggttggaagagctggacgcagctgtcaggtcctccgccgctcagcaccggtggccggaccacttttgcgcggacaaatgctacgctgagcctggagcccgggagccgcagctgctgggacgagccgttgagcatcaccgtgcgcggcctggcccccgagcagcccgtcacgctgcgcgcggccctgcgtgacgagaagggcgcgctcttccgagcccacgcgcgctaccgcgccgacgccggtggtgagctggacctggcgcgcgctcccgcgctgggcggcagcttcacggggctcgagcccatggggctgatctgggccatggagcccgaacggcctctctggcgcctggtcaagcgcgacgtgcagaagccttatgtggtggagctggaggtgctggacggacacgagcccgacggcggtcagcggctggcacaggcagtgcacgagcgtcacttcatggctccaggggtgcggcgcgtgcccgtgcgcgacgggcgggtgcgcgccacgctcttcctgcccccagaacctgggccctttcctgaaatcatagacctttttggagttggaggcggccttctggagtaccgggcgagtctgctggctgggaagggttttgccgtcatggctctggcttattacaactacgacgacctccccaagaccatggaaaccatgcgcattgagtactttgaagaagccgtgaactacctgcgtggccaccctgaggtaaaaggaccaggaattgggctgcttgggatttccaaagggggtgaacttggccttgctatggcctccttcctgaagggcatcacggctgctgttgtcatcaatggctccgtggctgctgttgggaacaccgtatgctacaaggatgagactataccccctgtgtcccttctgagagacaaagtcaaaatgaccaaagatggtctcttggatgtcgtggaagctctgcaaagccctttggtagacaagaagagcttcatccctgtggaaaggtctgacacgaccttcctgttcctcgttggtcaggatgaccacaactggaagagcgagttctatgccagagaggcctccaaacgcttgcaggcccacgggaaagagaagccccagatcatctgctacccagaagcagggcactatatcgagcctccttacttcccactgtgcagcgctggcatgcacctcttggtgggtgctaacatcacctttggaggggagcctaagcctcactctgtggcccagttggatgcatggcagcaactccagactttcttccacaaacagttgagtggtaagagttaggaggtgccccctaaaatataacctgttatgtggtggtttggggaaaaacccaaatatcagaatgccacttcagtttagttcatttgaacacatactaatttttttaagtttctttcttccttcctttctttctttctgttttttttttttgttgttgttgttgttgtttgtttgtttgtttgagacagggtttgtctgtttacccctggctggcctggaacttgctttgtagaccagaggctaggcctg

SEQ ID NO: 621 - DNA, 2817 bp, Rattus rattus (black rat)
gggcgcggcctggcgggccgggcggcgctgcagcccatggagctcgagaacatcgtagcgaacacggtgctactcaaggcccgggaaggtggtggcgggaatcgtaaaggcaagagcaagaaatggcgccagatgctgcagttcccccacatcagccagtgtgaagagctccggctcagccttgaacgtgactaccacagcctgtgtgagcgtcagcccattgggcgcctgttatttcgtgagttctgcgctacgaggcctgagctgacccgctgtactgccttcctggatggggtggctgagtatgaggtgacccctgatgagaaacggaaggcatgtgggtgtcggctaatgcagaattttctgagccacacgggtcctgacctcatccctgaagttccccggcagctggtgagtaactgtgcccagcggctagagcagggaccctgcaaagacctcttccaggagctgacccggctgacccatgagtacctaagcatggccccttttgccgactacctcgacagcatctacttcaaccgtttcctgcagtggaagtggctggaaaggcagccagtgaccaaaaacacctttaggcagtaccgagtcctgggcaaaggtggctttggggaggtgtgtgcctgccaggtgcgggcaacaggcaagatgtatgcgtgcaaaaaactggaaaagaaacgaataaagaagcggaagggggaggccatggctctcaacgagaagcagatcctggagaaagtgaacagtaggtttgtagtgagcttagcctacgcatatgagaccaaggatgcactgtgcctggtgctgacattgatgaatggaggcgacctcaagttccacatctaccacatgggccaggctggctttcccgaagcacgtgctgtcttctatgctgccgagatctgctgtggtctggaggacttacaccgggaacgcatcgtgtacagggacctaaagccagagaatatccttctggatgaccatggccacattcgaatctccgacctgggcctgactgtgcatgttcctgagggccagaccatcaaaggccgtgtgggcactgtgggctacatggctccagaggtggtgaagaatgagcgctacacattcagtcctgactggtgggcgctaggctgcctcctgtacgagatgattgcgggccagtcgcccttccagcagaggaagaagaagatcaagcgggaggaggtggagcggctggtcaaggaggtggctgaggagtacaccgaccgcttctccccacaggcacgctcactctgttctcagcttcccaacaaggaccctgctgagcgcctggggtgtcgtggaggtggtgcccgtgaggtaaaggagcacccccttttcaagaaactgaatttcaagcggctgggagctggaatgctagaaccaccttttaaacctgacccccaggccatttactgcaaggacgtgctggacattgaacagttctccacagttaaaggtgtggatctggagcccacagaccaagacttctaccagaagtttgccacgggtagtgtgtccatcccctggcagaacgagatggtggagactgagtgcttccaggaactaaatgtctttgggctggatgggtctgttcccccagacctggactggaaggggcagcccactgcaccccccaagaagggattgctacagagactcttcagtagacaagattgctgtgggaactgtagcgacagtgaagaagagctccccacccgcctctagcccccaggccgaggcccccaccggcggctggcggtagcagctactcagtgactgacgttgacagttttgcacagtgctgtttccagttgtccacgccagtcgtggtctgtggaacacagacggaactgtccccagtgtcctccgttcctcagccactggcccagctgagtttgacgaggcctgggccatcttgggacaaaggtgcgtcccttcagctcttctctgtggagctcggggctttatgtgtttatgtatttgtacgaatgtatatagctaccagagcgttattaactccaccctgggtctggcaccccagggcaactagccctggccaggagagccaggagctggcaagaggaaccagtgccaacctccaggctaatggggcccagtccagatgagcaagcagtgtgtgggccaggtcagacctctgaccacagcattgctccggccaccatcagactcaagtgagactcgtgcctgtctgttgtggactgaggccaccatgctccagttgcccaatgctttcattccgtctcagcgtttgtcagagctggagacgggggctttgtgttctccgggcctgggtcacagtgtgactgcaaactgagctgacggggacctatcacaccactgccccagatgggttgctttttgccttccagctcccagagcacattggtccttattctgggtcatatccaggccataagaggggttagaattagccctccaacattccagaatccctcataaaagtagacatgtgcccagcaataatccaaccttcctgtgtgtgcctgcgggaggcgggtgtgagtgtatatcattgtgtgaagagagtagggtaaggctgtgcctaagccccagaccctagccctagcctttcccagactgtgatggctgtcctgatgctagtaaggacagtatgggaccatacggccctggcgtttccatgtttaaagccaatgtgagctgccatgtgtctatgaccaatgtaagctgccatgtgtctgtctgtgtgaatacagtctgagcacaaggctggcc

SEQ ID NO: 622 - DNA, 1614 bp, Rattus norvegicus (Norway rat)
cgggccagcacaagatggcgttgcgagcgatgcggggaatcgtgaacggggccgcgcccgagctgcccgtgcccaccggtgggccgatggccggagctcgggagcaggcgctggcggtgagccggaactacctctcccagcctcgtctcacctacaagactgtctctggagtgaatggtccactagtgatcttagatcatgtaaagtttcccagatatgctgagattgtccacttgacattaccagatggcacaaaaagaagtgggcaagttctagaagttagtggctccaaagctgtggttcaggtatttgaaggaacatccggcatagatgccaagaaaacatcctgtgagtttactggagatattctccgcacaccagtgtctgaggatatgcttggtcgagtattcaatggatcaggaaaacccattgaccgaggtcctgtggtgttggccgaagacttccttgacatcatgggtcagccaatcaaccctcagtgtcgcatctacccagaagagatgattcagacgggcatttctgccatcgacggcatgaacagtattgcgaggggacagaaaatccccatcttttctgctgccgggttaccacacaacgagattgcagctcagatctgtcgccaggctggtttggtaaagaaatccaaagacgtggtagactacagtgaagaaaactttgccattgtgtttgctgctatgggagtaaacatggaaacagcccggttcttcaaatctgactttgaagaaaatggctcaatggacaatgtctgccttttcttgaatctggctaatgacccaactatcgagaggatcatcactcctcgcctggctctgaccaccgctgagtttctggcttaccagtgtgagaagcatgtcctggtcatcctgacagatatgagttcttacgctgaagcacttcgagaggtttcagctgccagggaagaggttcctggtcggcgaggcttccccggctacatgtatacggatttagccaccatctatgaacgcgctgggcgagtggaaggtagaaatggctctattacccaaatccctattctcaccatgcccaatgatgatatcactcatcctatccctgacttgactgggtatattactgagggccagatctatgtggacagacagctgcacaacagacagatttaccctcctattaatgtgctgccctcactctctcggttaatgaagtcagctattggagaaggaatgaccaggaaggatcatgctgatgtgtctaaccagttgtacgcatgctatgctatcggtaaggatgtgcaagccatgaaagctgtggtgggagaagaagccctgacctcagatgacctcctttacttggaatttctgcagaagtttgagaaaaacttcattactcagggtccctatgaaaatcgaactgtctatgagactttggacattggctggcagttgcttcgaatcttccccaaagaaatgctgaagaggatccctcagagtaccctgagcgaattttaccctcgagactctgcaaagcactagctgctgctgcttgtgcggctcgaccctcttgtgaagtgctggttctgtttcctgattccttttg

SEQ ID NO: 623 - DNA, 2228 bp, Rattus norvegicus (Norway rat)
atgttgcagcccgctcacccgcatcacgatgaacgcacagctgaccatggaggcgatcggcgagctgcacggggtgagccatgagccggtgcccgcccctgctgacctgctgggcgggagccctcacgcgcgcagctccgtggggcaccgcggcagccacctgcctcccgctcacccgcgttccatgggcatggcgtcgctgctggacggcggcagcggaggcagcgattaccaccaccaccaccgcgcccctgagcacagcttggctggccccctgcaccccaccatgaccatggcctgtgaaactcccccaggtatgagcatgcccaccacctacaccaccttaacccctctgcagccgctgccgcccatctccaccgtgtccgacaagttccctcaccaccatcaccaccaccatcaccaccaccacccacatcaccaccagcgcctggcgggcaacgtgagcggtagtttcacacttatgcgggatgagcgcgggctggcctccatgaataacctctataccccctaccacaaggacgtggctggcatgggccagagcctctcgcccctctctggctcgggtctgggcagcattcacaactcccagcaaggacttccccactatgctcatcccggcgcggctatgcccaccgacaagatgctcaccccaaatgactttgaagcccaccaccctgccatgctcggtcgccacggggagcagcacctcacgcccacctcggccggcatggtacccatcaacggccttcctccacaccatccccatgcccacctgaatgcccagggccacggacagctcctgggcacagcccgggagcccaacccttcggtgaccggcgcgcaggtcagcaatggaagtaattcagggcagatggaagagatcaataccaaagaggtggctcagcgtatcaccaccgagctcaaacgttacagcatcccacaggccatcttcgcgcagagggtgctctgccgttcccaggggaccctttcggacctgctgcgaaaccccaagccctggagcaaactcaagtccggtcgggagactttccggaggatgtggaagtggctgcaggagccggagttccagcgcatgtcggcgctccgcttagcagaaagcgccatgggtggcagtgtgccttctctgaggatcacatctggaggcccccaactgtctgttcctcccttacctgcctgcaaaaggaaagagcaagaacacgggaaggacagaggcaacacccccaaaaagcccaggctggtcttcacagacgtccaacgtcggactctacatgcaatattcaaggaaaataagcgtccgtccaaagaattacaaatcaccatttcccagcagctggggttggagctgagcactgtcagcaacttcttcatgaatgcgagaaggaggagtctggacaaatggcaggacgagggcagctccaattcaggcaactcttcgtcttcatcaagcacttgtaccaaagcatgaaggaagaaccacggactagaacctcggtggaaaagctttaaattaaataaaaaaagtttttaaagaccaggacctcaagatagcaggtttatacttagaaatatttgaaggaaaacaagtggtatttatagtccaaagaaaccaaagactaaaaagctcacctgcattctgactttgttcagagacacatacttcagcggggcaagactcggcaagaaagatgatggagaaaacgtcggatctcgcgccttcaacccctgcacctcactgtgctcggctgctcagtggctctaagcacagtaatgtttgagccatcgagtggacatcttttaagatcagacgttcttatctgttccaccacactgcaagggtgtgtagtgtctcaatatcacgtgtgagtatgtgtgtgcatgcgtgcacacgtaaacacacagcaacaccagtgtttagggactcaggcacggctggtcttcaggaagggttgcaccatatgacatgaccaagctggtgtgggatttctaagttcattggatctgagatgtgagttttctcatctaagcctagcgtttgaacctgccaggcccacaacctaaatgcagattcaaacccagcaaagaaaatttgaatggcacctaaaccagtacgctctctttgtttgttaagaaatgttcagatatttttaaaaaaaaatgaaacaagagtccatccattaaaaaaaaaaaaa

SEQ ID NO: 624 - DNA, 1414 bp, Rattus norvegicus (Norway rat)
gcgcctccttgttcccagcgtcaccactgccgccatgcccggagggctgcttctcggggacgaagcccccaactttgaggccaataccaccatcggccacatccgcttccacgatttcctaggagattcatggggcattctcttttcccacccacgggactttaccccagtgtgcaccacagaacttggcagagctgcaaagctggcgccagagtttgccaagaggaatgttaagttgattgctctttcaatagactctgttgaggaccattttgcctggagcaaggacatcaatgcttacaatggtgcagcacccacagaaaagctaccatttcccatcatcgacgataaggacagggaccttgccatcctgttgggcatgttggatccagcagagaaggatgaaaaaggcatgcccgtgacagcccgtgtggtattcatttttggccctgacaagaaactaaaactgtccatcctctacccagccaccacgggcagaaactttgatgagattctcagagtggttgactccctccagctgacagcatcaaatccagttgccactccagttgactggaagaagggagagagtgtgatggtccttcccaccctccctgaagaggaagccaaacaacttttccctaaaggagtcttcaccaaagagctcccatctggcaagaaatacctccgttatacgccccagccttaagtctgcgggaactggggctgcaactgctcgaccagcactgggacctgaggatgacagctgacagctgcagttccgtagaaagattgtggcgtggtcacagccgaagtcgcgtaggtcgctcgctatactactggctcattaaatggaaatggcaccaaaacattctcgggattctttactctgtgccttcgccagcattctgcccctccatccatcacagcgccctgctgactggctttctttgaaacgaattatgtgttggtgactgcagggtctctgcagggtctgtgatcagcaaggtagtgtcagtgtgggctccatgctagaatgataaacatcttttgtaggtttccaaactgaatcttctgttacccattgtggagaaccataaagtggggagaaactttcaattctgtactttcagtaaataaagcaggggaggtggggggggggggagagttctctataggaaatccatggtgagtttctatcaaagtgggcttccaagaatgtgtggaagacagcacatgtacttcctggagtttccaggtctgctctctagtgatctgtgaatgtgaactcgccttatgaaagacaggcagtgacattgtttgccactaaatgtcctaaaggagtgggttgccatttctaaattctgctgtgtgaggttcaacaataaaatcctgattagaaaaaaaaaaaaaa

SEQ ID NO: 625 - DNA, 2244 bp, Rattus norvegicus (Norway rat)
atggacttccttgatgagcccttccctgatgtggggacctatgaagacttccacaccatagactggctgagggaaaagtcccgggacactgacagacatagaaagataaccagcaaaagtaaagagtctatttgggagttcatcaagagtctgctggacgcatggtcaggatgggtggtgatgctacttattggtctgctagcaggtaccctggctggagttatcgatctcgctgttgactggatgacagacctcaaggagggcgtctgtctgtctgcattctggtacagccatgagcaatgctgctggacctccaatgagaccacttttgaggacagggacaagtgtcccctgtggcagaagtggtcagagcttcttctgagccagtcagagggtgctagcgcttacattctgaattacttaatgtacattctatgggcattgctgtttgcatttctggctgtctccctggtacgtgtgtttgcaccatatgcctgtggctctggcatacctgagataaagactattttgagtggctttatcatcaggggctacttggggaaatggactcttctaatcaagactgtcactctcgtgctggttgtatcctctggcctgagtcttgggaaagaggggccactggtgcatgtggcatgttgctgtggcaacttctttagcagccttttctccaagtatagcaagaatgaaggcaagaggcgtgaggtgctttccgctgcagctgctgctggtgtctctgtggcctttggtgctcccataggaggtgtactcttcagtctagaggaggtcagttactactttcccttgaaaaccttgtggaggtcattttttgcagccctggtggctgccttcacactgcgctccatcaacccctttggaaatagccgcctggttctcttttatgtggagtatcatacaccttggtacatggctgaactcttccctttcatcctgcttggagtctttgggggtttgtggggaaccgtcttcacacgctgcaacattgcctggtgcaggaggcgtaaaaccaccaggctggggaagtatccagtgttggaggtcattgtggtgacagccatcactgccatcattgcttatcccaatccctacactcgccagagcaccagtgagctcatatctgagctattcaatgattgtggggctcttgagtcttctcagctctgtgactacatcaatgaccccaacatgactcggcctgtggatgacattccggaccggccagctggggttggagtttacacagccatgtggcagctggccttggcactgatcttcaaaatagtcattactatatttacctttggcatgaagattccctcaggtctcttcatccccagtatggctgtaggagccatggcaggccggatggtgggaattggtgtggagcagctggcctaccatcatcatgactggatcatcttcaggaactggtgcaggcctggagcggactgtgtcacaccagggctttatgcgatggtgggagctgcagcctgtctaggtggagtgactaggatgacagtgtctctggtagtcatcatgtttgaactgactggaggtctggaatatattgtacccctgatggcagcggctgttaccagcaagtgggtggctgatgcctttgggaaagaagggatttatgaagcccacatccatctgaatgggtacccatttcttgatgtgaaggatgagttcactcaccgtaccctagccactgatgtgatgcggccccgcaggggagaaccacctttgtcagtactaacccaggacagcatgactgtggaggatgtggagactctcataaaagagacagactacaatgggtttcctgtggtggtctcgagagattcggagcgcctcataggctttgcccagaggcgggagctaatcttggctataaaaaatgccagacagaggcaagagggcatcgtgagcaattccatcatgtacttcacagaggagccccctgagctgcctgccaacagcccacatccactgaagctgaggcgcattctgaacctgagcccttttactgtcacagaccacacccccatggagacagtggtggacattttccggaaactggggctccgacaatgcctggtgacacggagtgggaggcttcttgggatcatcacaaaaaaagacgttctgagacacatggcgcagatggcaaaccaggaccctgaatccatcatttttaattag

SEQ ID NO: 626 - DNA, 1121 bp, Rattus norvegicus (Norway rat)
ggactccataccctttcctatctttaatggcaaaagaaatgactgggcacgaacgcctaaaccaaaactatgttttaaatctgtgttgggagagcgtgagagtgaatgtggattcaaaaataccttttctggaaacgtcgaaacattatcataacgtggaaaatcaagaatatgtaatcagatagatactcccattgtgaattttaaatattttaaagaatcgtctttaagactgtttagtggcagtgattgtctgtgctgtgggtcttaacttgtgatactaagtattaaatagctacgtttttcatgtatgtagatcatgcttttttgaaaaagcaaaacaatcaggtggcttttgcagttcaggaaattgaatgcagattttagcacagactgatttctttttcctttttaaatagctaggagctaaaactctaggggagaaggtaaaactagtttggatatgcaaaacatttattttgacataaaattgataaagatatttttaataatttacactgtaagcatgagtattttataatacactacagatatattgttagttcataacaatccatctacggatgtaacaactacaatgtgtagaggggttgatgctttggtcaatgaacctaaagaaaaatgaacaagttagatttttacaaagcccttttttataactcccaaaatttcttaaatctaaaaatgtctgcattattggaacaaacccattttaaatttgtaaatgaatattttttttaattttgaaaactttaattttttatacaaattaacgtatcatacaccaaacagtaacagaagtgattataataatggaagaaacagtttcttcaccaaatttccattcaagccacaaggctgtgtgtaagagaagtagaagtgatgtggtgtgactggctaggataaaggagatcttcaggagcacatgggtttagagagcccagggatcaggaaaaggaggctctcacatctgagcagtgctgtcctttcaaacacagcttggcttttatagtaacctaagaattaatgcatacaggaggagtttcacatgtgtgaaatccaatagcagatgggttaaagttaaacaagttatagcacag

SEQ ID NO: 627 - DNA, 315 bp, Rattus norvegicus (rat)
tttacactgtaagcatgagtattttataatacactacagatatattgttagttcataacaatccatctacggatgtaacaactacaatgtgtagaggggttgatgctttggtcaatgaacctaaagaaaaatgaacaagttagatttttacaaagcccttttttataactcccaaaatttcttaaatctaaaaatgtctgcattattggaacaaacccattttaaatttgtaaatgaatattttttttaattttgaaaactttaattttttatacaaattaacgtatcatacaccaaacagtaacagaagtgatt

SEQ ID NO: 628 - DNA, 1444 bp, Rattus norvegicus (Norway rat)
ccctctagatcaggacgtcgccggggtggctgtgacttggccaagtgctcgcatgagtcaaatgacaaggaagagacttctgccgtggaacccatgccgcaccggccacctttgccaagaccgcctgtgcctttttctctcgcaggtgcggcggggcatacctgtgatcccagcaattgggagactgagacaggaggatccaaccttcaaagctacatgccatggctgcccaggagtccctgcacgtgaagaccccactacgtgacacgatggcattgtccaaagtggccggcactagtgtgttccttaagatggacagctctcagccctctggctccttcaagatccgaggcattgggcatctctgcaagatgaaggcaaaacaaggctgtaaacatttcgtctgctcttcagtcgtccagatttggggttccagaatgaggggcagaagtcactctggagatgagcagccccacgtgaggtcccaggccctccttcctgatacaccctctccactgacagcgggcaacgcgggcatggcgactgcctatgctgccaggaggctgggcctcccagccactattgttgtgccaagcaccacacctgccctcaccattgagcggctgaagaacgaaggggccacagttgaagtggtgggagagatgctggatgaggccatccaactggccaaggctctggaaaagaacaaccaaggttgggtgtacatctcccccttcgatgaccctctcatctgggaaggccacacttcccttgtgaaggagctgaaggagacactgagcgccaagcccggggccattgtgctgtctgtgggcggtggaggcctgctgtgcggagtggtccaggggctgcgggaggtgggctgggaggatgtgcccatcatcgccatggagaccttcggcgcccacagcttccacgctgccgtcaaggaaggaaagctggtcaccctgcccaagatcaccagtgttgccaaggccttgggtgtgaacactgtgggggcacagaccctgaagctgttttacgaacaccccattttctctgaggtcatctcagaccaggaggctgtgactgctatcgagaagttcgtagacgatgagaagatcctggtggagcccgcgtgtggcgctgccctggctgcagtgtacagcggtgtggtgtgcaggctgcaggctgagggccgactgcaaaccccactggcctcgctggttgtcattgtgtgtggtggcagcaacatcagcctggcacagctgcaggcactcaaggcacagctgggcctgaatgagctactcaagtgatatctgctgctgccctggccaccctgaggggtcaccagcacccctgagtaggctgggtgggcgtccgcctgacagtggcccaccctcctttatccatgtttataatatgcactttttcattgtaaataaaa

SEQ ID NO: 629 - DNA, 3545 bp, Rattus norvegicus (Norway rat)
ggtctcccctttggaaattttcctgcttttgcaaaatgatgactatttctttgatttggggaattgccgtgttggtgagctgttgcatatggtttattgttggaataaggagaaggaaagctggtgaacctcctttggagaacgggttgattccgtacctgggctgtgctctgaaatttggatctaatcctcttgagttcctaagagctaatcaaaggaagcatggtcacgtttttacctgcaaactgatggggaaatatgtccatttcatcacaaactccctgtcataccacaaagtcttatgtcatggaaaatattttgactggaaaaaatttcattacactacttctgcgaaggcatttggacacagaagcattgacccaaatgatggaaataccacggaaaatataaacaacacttttaccaaaaccctccagggagatgctctgtgttcactttctgaagccatgatgcaaaacctccaatctgtcatgagacctcctggccttcctaaatcaaagagcaatgcctgggtcacggaagggatgtatgccttctgttaccgagtgatgtttgaagctggctatctaacactgtttggcagagatatttcaaagacagacacacaaaaagcacttattctaaacaaccttgacaacttcaaacaatttgaccaagtctttccggcactggtggcaggccttcctattcacttgttcaagaccgcacataaagctcgggaaaagctggctgagggattgaagcacaagaacctgtgtgtgagggaccaggtctctgaactgatccgtctacgtatgtttctcaatgacacgctctccacctttgacgacatggagaaggccaagacgcacctcgctattctctgggcatctcaagcaaacaccattcctgcaaccttttggagcttatttcaaatgatcaggagtcctgaagcaatgaaagcagcctctgaagaagtgagtggagctttacagagtgctggccaagagctcagctctggagggagtgccatttacttggatcaagtgcaactgaatgacctgccggtactagacagcatcatcaaggaggctctgaggctttccagtgcatccttgaatatccgcacagctaaggaggacttcactctccatcttgaggacggttcctataacatccgaaaagatgacatgatagctctttatccacagttaatgcacttggatcctgaaatctacccagaccctttgactttcaaatatgaccggtaccttgatgaaagcgggaaagcaaagaccaccttctacagtaatggaaacaagctgaagtgtttctacatgcccttcggatcaggcgcgacaatatgtcctggaagactctttgccgtccaagaaatcaagcagtttttgatcctgatgctctcctgctttgaactggagtttgtggagagccaagtcaagtgtccccctctagaccagtcccgggcaggcttgggaattttgccaccactacatgatattgagtttaaatataaactgaaacactgatacgtggttggaagaagcgaacactggatgatgtcacttggcggctgagagtcatcactaaacaggccttcgggaccaatgctcactgatgcgccctagcgactggattagtgggaagaactttgttctcgctgcccacattcctgggtgttcacatagctggggccagagcttcatcactttcagaaagcaatgtcttttgtatttattttcaaaatgaagatattccaattggcaggatatttttcctaaggaaattgctttatatttttatgaaaactaccaattaattatgaaagggcttgaaattcacgttttagtgaaattactgatttttcactagtaaggttcttcaggtgtgaaactgtattataaaaatgttgtaatgggtcacactgtgctttgcataaaggtaaaggaaactatgtttcagccttttctgtgtctatgagcttcgaaaataatcttactgttctagaaacactggggaggtttcgacatgctctcgctatattttattttactgttgctagaaattttcattccagttttcaactaccttatctttcccccattttgacatgcatgccaatgagaagagtattttttaggaattaacaaggcacctcccagaaccctaccctgagacttttaagcctttaatcccagcactcgagaagtagagccaggcagatctctgagtctgaggttattctggtctacatcagctccagacaagccaggactacagaatgggatcttgtctaaaaaatacagctaatctttatgtcataactgattatgaatcaacctaaaagataaattttcaatcaggactcagagaaaatgagcaattaaaaaacttagctctgaggtatgtggaattcattaagtacaagttgacattacatgttctttaaaaatagtttatgttttatctctaaatgccctgcagatgaagaataataatgaaaagttgaataatactgtttaaacactaagtgcaataatgctttggtaatgtactttaagagaatcattagccgtgccagttttactaaaatatatttatatgtaaattatatttatctttttcttataccataaatataaaaatattgcaacatttagtaattttaaaattatatacctttcagaaaatgatgtatgaatgtttgtatgttttttaactttgaacagaacatttaaattattcatctacggtgatttttatcttatttatttctttttgtctcattcatatcttgaagaaatccaaaaatatctgaaggaatcgctcactcaaatgtctccctatggttacagaaaaattcaataccatgtttttgtcctcggggactgaagcagggtgtcgtgggtgccgagcagaggctcctgctgcagcgagctttatccacgggactccttaaacttttaaaatcttatcactattatcatgcatttattacctaagtaggatatttccctttcctttttcatttcagccgagtcccttagcaacccaggctgactgggaccctccatgtagcttaagctgtgaactcactgtacttcctgttttcacttattttaggaagtaattttccctatcagaaattttaattgtttagatgatgtataagagtaacacaattctgttatatactaatctgtagtaaactaaatttgttcttagaacaagtttgatgactctcaaattgaatgtatccatacatctttccatggcttcttgaatgcccatttctcatacacagaatgatgggtttcacggtgatgtcttcctttcatgtctttattcttgtgcggtgatggttggcaaatgatacccatggagcaaggttactcttcctatttctgtgcagcctaagtgttaagaataatttttaaatacttggagggaaggcacattttgtgtcatatgtgaagtgacatgtgacacacagactagcaaatccttgagtaaaattttattgggat

SEQ ID NO: 630 - DNA, 9578 bp, Rattus rattus (black rat)
gaattccggagctgctgtgggacagccgccctggaattgcgtgtcactgagcaagctgttcttcaccctgaggacatccaaggaacatctccagagattgcccagtgtcccctgggtacaaaaatcacaccaccttgaggacagctgagttgaacagaggtgtgggaaggaggcgtgtgagaatgatcggcaaagctggtgggtgtgggggctgggaatccggcgcagatgactgagggctttcctggcattctgagggacctgagtctgatcctcagtgccatgtgaggtgggcacggttggcacgcgcctgtaatggcagcattctgaaggcggaggcaggaggatcgggagttgaagggcatcttcagctactcggtgagtccgaggccagcctgggttatgtgagaccctgactcaattttaaatgataggtgtgtccaaactacccagtcctgttgtcatctgtccccagcccaacccaatcctccacatcagctctgcactctcttaaaactatgagtccctgggttcaattcccagtgtcctcagctaccctctgccctggtgactctcagcaaacaccatcctccaagcctgccctcatctacaacaaggactaagggagcccacccactgctgtgtcttaacacacgtgaaaccccccacacaggaggcaaatgatgtggaaccagggtcccccattgctttggcaatgagatgctggtccagagagtacaaggtagctgtgtccacacatgggctttgtgtcatcctggcttgcctacttccctctatccctgacccaaacctgtggtcatccctaatgcggatggtcagaaagaacaatgcacaccacaggccagaaaaagcagcagacgtggggctggagagatggctcagtggttaagagcactggctgctcctccagaggtcctgagttcaaatcccagcaaccacatggtggctcacaaccatctgtcatggactctgatgccctcttctggtgtgtctgaagtcagcgatggtgtgctcacatatattaaataaacaaataaatcttttttaaaaaaaagcacatggactctgtgtgtgtgtgtgtgtgtgtgtgtgtgtgtgtgtgtgtttatgctgtggacacacaggtctctgcacacagcctggaaacgggtcagaggggatggtcacgatggtcatagtggtggtggtggtgatggttactggtactgatactgatggtagtgctgatagtgttgacagtggtggccaatagtgaatagtgatggtgatgataaaggttaccaacactggctacctgttcaatttcaagtctctcacctaacgcagtcccacctcttcaaagcctggaacagcggtacccatgtcatccctgtttacacacgaacagaggctctcgaggtcaaggttcttgcccagagccatgtatctagtaacagcagagcaggacttgaacccagatcccctttgtctaacccatacgcccttttatatgaagaggatggcaggggatggtggtaagcaaggggtgtcaatcatagcttgggcgtcaacccccaagtcccgcctttcactatctatacgagctgtgcctcatttccactctgtacagacctgttggatggttttacattgatttgggttcatgaagctgagccccatactccccgccctttttctttctattttgagacaggctctcactccttagtccaggctgtccttctgcctcagcttctattgttctggcttgaaggtgtgagttgccatatggctggcctgtgtgtttcttggccataaacagaccagcaactgtccggcttttctgttatttctgggattgacccctgggactctggcaggagctcctcagtgctgcgctgcccgcccacgagtcctataggcctttcggagatgaatgtcttcatttgcaacggaaaaaaaaaaaaaaaaaaaaaagaacggggagagaaggtgaggcggaccttggagggcagaacaagtggtgcagcatggaccagggggcggggatttctgggggcgtggcctgcctgggccctcattggctgcccggaggctcagcccggagaataaagccctggggtgtcctgccaactttccactctcccaggacacagacaaaatctacccttctcgctcgctctgtccagctcctcctgtgccgggtatgtggccctcagcctcagtctcaccccaagattgacagccagagcagggtaccgggaagggaagagggactgggactcatccagttcaagtctccatgtactgatctgtaaaatgggacgatgatataggccctctagatcaggacgtcgccggggtggctgtgacttggccaagtgctcgcatgagtcaaatgacaaggaagagacttctgccgtggaacccatgccgcaccggccacctttgccaagaccgcctgtgcctttttctctcgcaggtcatatcacctatagaggcggatgcgactggcctctggggtgggaatcagtatggagtacactgcccattttcccaaaggtttccaatgctacagcctgggacaggaaccaggcagggttcgccaaagccacctggaaggggtctgcgtggcggaaactatccactagccaaaggctgcactggctgggccttttgggtccagagaagaccctgtatgtcaggatggggctagctaggacaaagcaaagaaatttggagttactcttgtgtgccattgtttccgactgcctttcaagaggtcttctagaaagaggagtctggtggcttgcctataatctcagcacttgagagactgaggcaggaggatcacaagtctgtctctgtctgtctgtctcttgactgaggcaggagaatcacaaggagtttaatctctcctacactcacacacagtcactcgaattcgtgtagatgctgggaagagacaccacctgcctaggtttggtcccacttgactctgtatctctcttggggcttctcacagggctccaaggtgaaagtggctgagccggtgttaacccaaaggcttcctcactgtcctggctcccgaggggacctcagggtgccattagccaaacttgccgtgcagcctctatctgcatcgaggttccctctcattgtggacgctgtatgacgagggcaagccagaggtctctgttgcctcttccccatgccagaaaaagcaattccataattctatctttttaaaagaatgagagcctttcagagctcgatgctggatttccaggtcttttgggggttttgttttgttttgaaacagactcctatacagcccagggtggccctcaaactccctacatagccaaggttgaccttgaatggctagtcctcttgcccttgcccccaagcaatgggattacaggcctcctgcaccaagcccatttttttcttcaaaaatatgtatttgtcgaacacaggtgcggcggggcatacctgtgatcccagcaattgggagactgagacaggaggatccaaccttcaaagctacatggtaagaacatactgagtttgttttaaagcatgtgtggggttgggatatggctcagtctatgaagggcttcctgggaaagcatgagggcctgtgttcatattcccagaatgcacctcaaaaatgctgagctcaacaataaatggctatcatccctgcactagggagcaagagacagaaggacctcaagggacatccaggggcctctggaacctcaggggacttctgggaacctctggggacctcagagcctccggggttctctggccagccagttggactgaatcagggtgctcctggttcagtgcaagaccctgcctcaaaaatagtgggcagctgaggaggctactgactgatgttgacctctggtttctccacacacacacacacacacacacacacacacacgcacgcacgcacgcacgtgcgcgcgcacgcacacacacacacatgtttaagtaatatataatagggcaaaatgctgagcacggaggggtgctgtggcccggagggtcactcttcacaggtaccccatttggcccattttgtgtgtgtgtgtgtgtgtgtgtgtgtgtgtgtgtgtgtgtgtgtgtgtgtgtgctgacatactctgagctcatgggaacaggtcagcccgggttggttcctgaggactttgcagaaacagaccctggctgaccctggctgtgctttgttcccatcttgtggcctcattctgagccagtttgaacaagcccctccctctgaactttagcccaacgctgcagcctaaagatgtttctgagcttgtgaccttctaactttgggccactgggtagttggagctgagctttgatttggtgtcctttccttatcattatgggtatgaaagagtggtcctagagcccaggagggcagcctctcttgaccctctgtatctcctctctgcccccagccatggctgcccaggagtccctgcacgtgaagaccccactacgtgacagcatggcattgtccaaagtggccggcactagtgtgttccttaagatggacagctctcagccctctggctccttcaagatccgaggcattgggcatctctgcaagatggtacaaggcagggtggcatactggcaggagaggcagtccctcctacctgacagctgtagaggcaggtgtgcagatacacacccaggattccaaacggaggcaggaaggtggaaagtgaatggtatcccagagtgcatagcaagaacctgtctctaaggaataataataattttagggactgcagttgagacagctcggcggctgagagcactggctgcttttgcaggggacttgagctcagttcccgcaaccccatggtggctcacgatcaactataactccagctccaggagatccaacactctcttctgatttcccggagcaactgcatcacatgcatataattcaaaataagtaaatattgggctggagcgataattcagtggttaggaatacttggggctctttcagaacagccatgctcaccctcagcatccaagtgagcgaggggctgtaactccagctgcagggcatcaaatgctctcctctgccctctacaggcaatacgtacacacagacacaagtgcacataaagaaaacacatcttttttttttctttttaagaatttttatttattttacttatatgagcacactgttgctgtcttcagaaacaccagaagagggcaccagatcccatcgcagatggttgtgagccaccatgtggttgctggggattgaactcaggacctctggaagagcagtcagtgctcttaacccctaagccatctctccagcccaagaaagcacatcctaaataaataaataaaatatgttttaaagaaaataataattttagaataggtttcacacatcagggctctctctggctaaggggtgcccaccctacagactgacacctgcctccttaccccagttaatcaccttgggggagatgagcctgagagagtggttcagataccaagtgggcaagctcagatgttccagtggtgaggacgtgtcctaggcagggacttgggggtggcctgatccttcctcttgtccccacagaaggcaaaacaaggctgtaaacatttcgtctgctcttcaggtgagtgcccagttcgttttctttcccttcctaccctgttctgtgtgtcctgtggcccagcaccaggcattctccctggactctgggctctgcaacaacacatccattcgtagtcgtccagatttggggttccagaatgaggggcagaagtcactctggagatgagcagccccacgtgaggtcccaggccctccttcctgatacaccctctccactgacagcgggcaacgcgggcatggcgactgcctatgctgccaggaggctgggcctcccagccactattgttgtgccaagcaccacacctgccctcaccattgagcggctgaagaacgaaggggccacagttgaagtggtgggagaggtgagtgcagacctattgtgggcagcagagctggcgggtggaggtggggggctgataactggatagagccctcgttcatctcaatctcttcctgcccccacccctgcagatgctggatgaggccatccaactggccaaggctctggaaaagaacaacccaggttgggtgtacatctcccccttcgatgaccctctcatctggtaagttggagccaccccactccctactgcatgtgtggtctctgctcatgttctcgccggcacaccagccatgaggggtccccagatgcagagattcggagagatcgactcatcttggggtggctaggagcaaactaactagggaacgcatcggtggaggtggctttcatgtgccagcatctgccctgaacaactgaagcttggcccctgggaaccctgggagtcggtggggaatgagcatctaaggatgtgtccactggtgggcaggaaatgggggtttatctaccacacccacagccatctcctctctgggagtgcgtggggtgagggggtgggggggtggggtcttgtctcctaccctgtgccctgagcagcagggaggtcagaggtcaggttcatcatggcctggcatagagggaaaaacagaccttagctggtatctttgaccagcccttgtgtcttcaggaagccctgacctgacctgccacccctctcttgcccagggaaggccacacttcccttgtgaaggagctgaaggagacactgagcgccaagcccggggccattgtgctgtctgtgggcggtggaggcctgctgtgcggagtggtccaggggctgcgggaggtgggctgggaggatgtgcccatcatcgccatggagaccttcggcgcccacagcttccacgctgccgtcaaggaaggaaagctggtcaccctgcccaagatcaccaggtgagcccggggcacctctccagcacacaggcggtggagctgagcctttggtcctttgcccgaagccacactctcgcgcgccgtctgggccttgaacgtgagtccgttctttatgtgacagtgcttaagtgacgtccttcgcttcttgaggtcctcacgcctcatttcttttgctgctgtttgatctggcctccgaaatgtgccagaccctggctggtcctggactcagcctgggagaaaacaatctctggcctgcaaagaatttataaccaaaccccaccgcggcggctcaaaccaaactgagctctagttctatttaagactattaggggcaactcttcgaaccaggggctcagttcctttagtctcttgtcccgccactgagagtgttgacctagggtccaaagtggctgctttggtgccagccaccgcacacacactccctctgaaaagaggctaagcaagagcagaagtgtttctaaactttaaagaccaagtagagctgctccccagctgacaatggggtcacacccaatctttaaccattcgttaaagattgctatgaatgagttgaacctggtctgctggacgccttacctaagctttttggcacacggtacagaactggctgcttcttgctgataggctgatgggagaggtctccctcaaggctgccactgggcaacccaagagcggattgtactgcaaacccatagtctgagaaaaggtctgagttcaactctcaaagtttggtttgtaccaaatgtggatttttttttttttgacaccacaacgttgaactctcatagaccaaccctcagaaatcagagctgtctgtacttccctcttatcatgcactgggcagtgcttggtcacatgaccatacctagctgcaagggaggcagggcaaggttcacactaggcatccacaagaacagctagaagggatttctagagagaggatggcttctgtcataggtagggaacaccgaatcagttaaaagactcttccatatttttgggcaccatggtgagactgatgccatcctgctaccactattctttcctgccgataggaatacagatgcagtagctggcactcaagcagccatttttggaccctaagttaatatgaccctggggcagatattgcctcatctgtttcccactctatacaacttggagcttggaaagtgtgtgacagacacctgatactttaggaaggactagttctccctgtttgttagagtgtgggagggctgtctgagagcctcaactaatccatgagaccaaggagtccctctgggagtctccctggaagaggtagcaagtgagcaaagcaggcggaggttacaagctggcaggctgggggtgggggtggggcagcagagtccttctggtatctgaatcaggccagtttgatatcctagaccactgtacaggttcctggggctgggcagggttgcccactcccactgttcacctgtagtccccgcatctcacgtgcacccttctaccttgtctctccccatgtccacccccctctcattcccacctcccagtgttgccaaggccttgggtgtgaacactgtgggggcacagaccctgaagctgttttacgaacaccccattttctctgaggtcatctcagaccaggaggctgtgactgctatcgagaagttcgtaggtatgttctgtgggatctttttgtccttgattttctccctcctcagcctagaccatctcatgaaaggaaactaaagccagtcagtggtaaacgcaaaagctgctcgagaaaacatgaacctggttaaccatgatagcagggaggacaaactagttttataagtgccagttttgagctttctggtagccagagtcaaaagggaaagggccaagatgaggtgatctctctgggcttagcctgggagatggtcaaaggaacgagagtagtgcacactgccattaataacttcagcttgctacaccactagagagcaaccttctcaggggcccaggaaccccaagcacagactgtagaaaccgagactgggttcagaacaaacagtcctggccacagtgactgacgagagctgacgagccccctcccctacagacgatgagaagatcctggtggagcccgcgtgtggcgctgccctggctgcagtgtacagcggtgtggtgtgcaggctgcaggctgagggccgactgcaaaccccactggcctcgctggttgtcattgtgtgtggtggcagcaacatcagcctggcacagctgcaggcactcaaggcacagctgggcctgaatgagctactcaagtgatatctgctgctgccctggccaccctgaggggtcaccagcacccctgagtaggctgggtgggcgtccgcctgacagtggcccaccctcctttatccatgtttataatatgcactttttcattgtaaataaaaattaatatatatatgtttataaagcaaagatcttttgagctttgttattgacatggggtctatgtgcagcccaggctggcttcaaactggagatccaagcttgggtgaggtcgactctagaggatcgatccccgggcgagct

SEQ ID NO: 631 - DNA, 266 bp, Rattus norvegicus (rat)
tagaaaggtgcacttctctgagaaagttacagtccatttccttgctgtctgggcaggaccagcccaggctgctcgtcgaggcccctgggagcagtttgcacgagatcgaagccgctttgctcgacgcattgccaggcagaggagcagctgggtccttaccttacccctgctttcagggccagagcatggacacgccttagaaacctaccccttcctctgtcgtcctcgtctcttccactgcctgagccttgctcttccactgaggc

SEQ ID NO: 632 - DNA, 1733 bp, Rattus norvegicus (Norway rat)
agcagacagaaactgcccgcacccgctagctttagcagccctcagcgtggaccctctcgcaacttggcaccctcaagatccctgcggttccaaccagacccgctccacggcgctggctgtgcagcccgagcctcggccgcctggcagtcaccctgggaagcggtgggacggggagacagccgttctctctggtagccgataacggggaatggagaccaattgtcgcaaactagtgtcggcctgtgtgcaattagagaaagataagggccagcagggaaagaatgaggatgtgggcgcagaggacccgtccaagaagaagcggcaacgccggcagaggactcactttactagtcagcagctccaggagctggaagccactttccagagaaaccgctacccagacatgtccactcgcgaagaaatcgccgtgtggaccaaccttacggaagcccgagtccgggtttggttcaagaatcgccgggccaaatggagaaagcgggagcgcaaccagcaggccgagctgtgtaagaatggcttcgggccgcagttcaatgggctcatgcagccgtacgatgacatgtaccccggctactcgtacaacaattgggctgccaagggcctcacgtcagcgtctctgtccaccaagagcttccccttcttcaactctatgaacgtcaatcccctatcctcccagagcatgttttccccgcccaactccatctcatccatgagtatgtcgtccagcatggtgccgtccgcggtgaccggcgtcccgggctccagcctcaatagcctgaataacttgaacaacctgagcagcccgtcgctgaattccgcggtgcccacgcccgcctgtccttacgcgccgccgactcctccgtacgtttatagggacacatgtaactcgagcctggccagtctgagactaaaagcaaagcaacactccagcttcggctacgccagcgtgcagaacccggcctccaacctgagcgcttgccagtatgcggtcgaccggccggtgtgaaccgcgcccagggcgcgggattccgaggactgtcggagtgggcaactctgcccgagaaagactgagaattgtgctagaaggtcgtgcgcactacggggagaaagagggggggacaaaagagatcagaggaaaagaaaccactgaattcaaagagagagagcgcctttgatttcaaaggaatgcccccaagtgtctgccatcttccgctgaaagtattcccaacagttggaggacgcgtgcaccaacaaatgtttgactggatatgacattttaacattactataagcttgttattttttaagtttagcattgttaacattaaaatgactgaaaggatgtatatatatcgaaatgtcaaattaattttataaaagcagttgttagtactctcacgacagtgtttttaaaggctaggctttaaaataaagcatgttatccagaatcagttaggatttttcggcttgcgagcaaaggaatgtatatactaaatgccacactgtatgtttctaacatattattattataaaaaatgtgtgaatataagttttagagtagtttctctggtggatgccttgtttctgaaactgctacgtacaacctatcctgtgtataacatttcgtacgatattgttttacttttcagcaaatatgaaaaaatgtgttttatttcttgggagtaaaatataccgcataaaaaaaaaaaaaaaaa

SEQ ID NO: 633 - DNA, 2335 bp, Rattus norvegicus (Norway rat)
gtccccaagctccaccagcccttggtgaaccgacagggagcgtccggctttcccagcaccactttgccagactcaaaacagccacaccgcaaagtgagcctcgggcggaaggaggcggagctacaggcggccccgcctccgcggagggatacgtgtctccgcggtccaaaaccccggggcgaggcggccggggcgtgtgagccgctcggccagctgccgtctacgggcttccgcgcggccaccgggcaactgcgccgcgcggctgccccactgagcgctcggcctcggggccgtgggatccgccgcgctgtctgcggtcaggaagaccgccctcccgcgtccgtgccggacgggtcagaggcggcgccgcacgcgaggccacccgcgatgctgctgtccaagttcggctccctggcgcacctctgcgggcctggcggcgtggaccacctcccagtgaagatcctacagccagccaaggcggacaaggagagcttcgagaaggtgtaccaggtgggcgccgtgctcggcagcggcggcttcggcacggtctacgcgggcagccgcatcgccgacggactcccggtggctgtgaagcacgtggtgaaggagcgggtgaccgagtggggcagtctcggcggaatggccgtgcccctggaggtggtgctgctgcgcaaggtgggcgcggcgggcggcgcgcgcggcgtcatccgcctgctggactggttcgagcggcccgacggcttcctgctggtgctggagcgacccgagccggcacaggacctcttcgacttcatcactgaacgcggcgccctggacgagcctctggctcgtcgcttcttcgcgcaggtgctcgccgctgtgcggcactgccacaattgtggggtcgtgcaccgcgacatcaaggacgagaacctgctggtggacttgcgctcgggcgagctgaagctcatcgacttcggctcgggcgcggtgctcaaggacacggtctacactgactttgatggcacccgtgtgtacagccccccagagtggatccggtatcatcgatatcacgggcggtctgccactgtgtggtctctgggtgtactgctctacgacatggtgtgtggggacattccctttgagcaggatgaggagatcttgcgcggcaggctctttttccggaggagggtctccccagagtgccagcagcttattgagtggtgtctctccctgcggccctcagagaggccctcgctggaccaaattgctgcccatccctggatgctggggacagagggcagcgttccagagaactgtgaccttcggctctgtgccctggatactgatgacggagccagtaccacttccagcagtgagagcttgtgaggaggaggaggggcctggactccacactgggggcctgggctcagcctagccagccctctcccagaatgaacattttctgcctgggatgtctcctgcaaaagcagtgacctctgacccctggtgacctttgctctcggcaccgggcctgtttcctttgctttgagtgcctttttgaacgctgctccacagggcctgggttttcttgagctcttctgtccaaagatggctgcgggctaagcaaggtcccgcctgccctgggtggatacttgaacccgagaccctaccctgctgctccatcttgcggcagccttcctgaccaagtgtgtttgacatggagcgccctgtggtgcccacctccaaccctccagtctcctggtcttcgtctgggcatgtctgcacaagcaatgcaacgctgggccactgctgcccgcctgcctccctggcaccgcacgcaacgagcgtgccacggtctcttatttatggtgtgatcaccctggagggcgcccctgccctgctggggctatttattgtttaatttatttgctgaggttacttcctccaagcaaccaccttctccaggcccctggggtgttcaggaaagccaagggtggccgttcagtccacagacggcatcctggttcctgcacctgcagtaggtccctaaccccatgtttgtgggaggaggaatttgtacagtggctaatttaaggggagtgggagaccctgtcaccctgggcactctgcgctggggagggggtttaaattattgaccttgtacagtctgcttgctggctctgaaagctggggtgggggacagagtctcaagcccttaatttattttagcaactgtgttctgtgaccctggtgtgagtaggcatcaggggtggggttgtataagttcaaaagtgtgaaatgtctggagatcatattttttatacaggtatttcaattaaatgttttggtatat

SEQ ID NO: 634 - DNA, 2600 bp, Rattus norvegicus (Norway rat)
  misc_feature (1714)..(1714): n
gcgatctactctcagtcttcctgagtcacaggctaccaaggacaagtagctctgtctgccctttgttgaggggagctgtgacactggtttgctgctgctgctgctgctgctgctgcatcttctttgggaaatcagactcaataaactgccatccatctgaggttctcaactcagagccatctacctggagcatgggactttcaaatgtccagctctggacaatactgctgtgggcattggcatgggtgcagagtacaagatctgcgtgcccgtcctgtggggccccaactctgacaccccaaggagaacgcgctctggtcctagagctagccaagcagcaaatcctggagggactgcacctaaccagccgtcccagaataactcgtcctctgccccaggcagcactgaccagagccctccggagactgcagcccaggagcatggtccctggcaaccgagagaaagtcatcagctttgctaccagcatagacaaatccacttcaacctaccgctccgtgctcaccttccaactgtcccctctttggtcccaccacctgtaccatgcccgcctctggctgcacgtgcctccctcttttccggccactctgtatctgaggatcttcggttgcggtaccacgaggtgcagaggatcccgcacgttcctagctgagcaccaaaccacttcctccggctggcacgccctgactctgccctctagcggcttgcggagtgaggaatctggagtcacaaaactccaactggaattcagacctctggaccttaacagcactactgccagactgccacggctgctgttggacacagcgggacagcagcgtcccttcttggaacttaagatccgagctaatgaacccggagcaggccgggccaggaggaggactcccacctgtgagtctgagacccccttatgttgtagacgagaccactatgtcgatttccaggagctggggtggagagactggatcctgcagccggagggataccagctgaattactgcagtgggcagtgcccgccccacctggctggcagccctggcattgctgcttccttccattctgctgtctttagcctcctcaaagccaacaacccttggcctgcgggttcttcctgctgtgtccccaccgcgcgaaggcctctctccctcctctaccttgaccataatggcaatgtggtcaagaccgatgtgccagacatggttgtagaggcctgtggctgcagctagcaagaggacctgaaggttttgagtgaagttcaaggttcaagttgggggttcccaagcaaaagggtcctgtgtctggaagcacaagttccggatccatactgacacccaacaagctgtgtagcagtatgcctgagtttgacccctgtggaactcaaatgggcatttttcttgtcccagattctggcctatttcaggctgtttcaaatgtggacagatgggtaaaacgtttcctttcgagaaactgcctggccagcaccatttcctacatcaagccctgttccaggacagcaggggatgccgtgggagggaaggaagaatgcagggaaaactacttagtctctcccgaaaaagaattcctcaagtaataaaggaggaattagaaggttaggcagattggggaaaggtatacaggctaagaacagggactgttgcctgctttgagcaaggtcaagaggaatatgagcaggcantgaggtgggagagcagttaggaggccctggaattgacagtcagtaaaaaggggtgctgaacccataagttctctagcttccccttggggagaggacccatgtaaatgacatacgtttatattttcttaataaaaaggagaaagaaaagcaacagtgtgtaaggggttgttaaaatgagccagaaacaaagtgtggtctggggacctctgtgcttcggggccttttcaaggggttttcaaactatttgcataatcacatagagaagttatttgtcatttactatcattattttttcattgttctgtgggaacagggtttacacttataactacagccctcaggaggctgagacaggaggatcgccgtgagttcaagaccagccttcatagtgaatgctgggctagcctgagctatggagtgagatcctgtctcaaagcaaaagaaacaaacaaaacaacaaagactaagtagtgagtctttccagagtgtattatatgatacagccgatgacattgtggcttatatattctcctttctctcctttaaacaattttatttatttttattgtatgtgtatgatgagtcttaggcctgcaccggcttgcagtgcccatagaggtcagaagaggacgctggatccttggaactaaagttagagcagtgtgagctgcctgtgtctgttaacagaactcaggtccacagtaagagaaacaaacaattaaaggctgagctacctctccacctgagacatgtgcacacacagtcacacattgttttgttttgtttggaaacagcccacgctatcttggaactctcaatcctcctgcctcagaccctcctgccctggaattaaaggcataaaccaccaaaaaaaaaaaaaaaaaaa

SEQ ID NO: 635 - DNA, 92 bp, Rattus norvegicus (rat)
agccgacattctgtttggcacacgttattatctgcttattttccaggatacacatttccctgagaacccacggcagagatgtgagggcagaa

SEQ ID NO: 636 - DNA, 2199 bp, Rattus norvegicus (Norway rat)
ccggaaggagttcggcaggtctcccggaccccctttgtgaactacattttgggtagaacattttaatcaccgaaacccttctgaggaaaaaaagactcccactgccccctgcaaaaaaacaaaagcaaaaacaaaaaaaccaaaccccaaacccccaaatctcagtcttagctggtgccaccaaagaagcttttgagccatgtggacttttcttggaattgctactttcacctatttttataagaaatgcggggatgtcaccctggccaacaaggagctcctgctgtgcgtactggtgttcctgtcgctgggcctggtgctctcctaccgctgtcgccatcgaaacgggggcctccttggccgccatcagagcggctcccagttcgctgccttctcagatattctctctgctttgcctcttattggcttcttctgggccaaatcaccccctgaatcagaaaagaaagaacagctggagtccaagaggcgcagaaaagaagtcaatctgtcagagacgacgttaacgggagcagctacctcagtatcgacatcatctgtgacggacccagaagtgatcatcatagggtctggtgtacttggctctgctttggcaacagtactctctagagatggaagaacggtgacagtaatcgagagagatttaaaagagcctgacagaatacttggagagtgtctgcagcccggtggctatcgagttcttcgagagctgggccttggagatacagtagaaagtcttaatgcccatcatatacacggctacgtaattcatgactgtgaaagcaggtctgaagttcaaattccatacccggtgtcagaaaacaaccaagtacagagtggggttgctttccaccatggcaagttcatcatgagtctccggaaagcagctatggcagagcccaatgtaaagtttatagaaggtgttgtgcttcggttactagaggaagatgatgctgtgattggtgtgcaatacaaggacaaggagactggggacaccaaggagctccatgccccgctcactgttgttgccgacgggctcttctccaagttcaggaagaacctcatctccaataaagtctctgtttcctcccacttcgttggcttcattatgaaggatgcaccacagtttaaagccaatttcgcggagcttgttctggtcgatcccagtccagttctcatctaccagatttcacccagcgaaactagggtgcttgtcgatattcgaggagaattgccaagaaacttaagagaatacatgacagaacaaatttacccacagatacctgatcacttgaaggaatcatttctggaggcctgtcagaatgctcgtctgcggaccatgccagcaagcttccttcctccttcctcagtgaacaaacgaggcgtcctacttctgggagatgcgtataacctgaggcatcctcttactggtggaggaatgacagtcgctttaaaagatataaaaatatggagacaactgttaaaagatattcctgacctttatgatgatgccgctattttccaggccaaaaagtcattcttttggtcaagaaaaaggagccattcctttgttgtgaacgtgctggctcaggcgttgtatgaactattttctgctacagatgattccttgcgtcagctccgaaaagcttgctttctttattttaaacttggtggagaatgtttgactggtcctgttgggttgctttctatattgtctcctgaccctctcctattgattcgacacttcttctccgttgcagtctatgccacgtatttctgcttcaagtcagagccatgggctacaaaacctcgggctcttttcagtagtggtgctatactgtacaaagcgtgctctataatatttcctctcatctattcagaaatgaagtatctggttcactgaaagggaaaccacatggaagtcattgggacttgaggaggatgtacatagcctaggactgtgtgtgtgacttctgcagtggtgactcaaggaccaagcttgtgtataagcatgtaaatatatgccttaattcacaattgagaatgaagggtcaataagctagatgtttaaaagaatgattgtttccacaaattaatgttaacactcaagtgtttggatttcagtattggggtgattcaattggggacaatgccaaataaaatgaaggagtggaactcctt

SEQ ID NO: 637 - DNA, 1111 bp, Rattus norvegicus (Norway rat)
agagccaggaagaaacaggaacaagacacagaccatgagctccagccaatcaggggtctgcccatgccagggctctgcaagccaccccaccattctctacacacttctaagccccggtcccaggaccaggcccatggcacccgcatctcgcagccactgcctgtgccagcaacaccggcctgtgcgcctgtgtgctccacaccgcacctgcagggaggccttggatgtcctaggcaagactgtagccttcctcaggaacctgccgtccttctgcctcctgccccatgaggatcagcgacggctgctagagggctgctggggccctctcttcctgcttgggttggcccaggatactgtgacctttgaggtggccgaggctccggtccccagcatacttaaaaagatcttgctagaggaacccaacagtggtgcccagggtgcccagccaccagacccaccacaaccctcactggctgccgtgcagtggctgcagcactgcctggagtctttctggagccttgagctgggtcccaaggagtacgcatacctgaaaggcactatcctcttcaacccagatgtgccaggcctccatgcctcctgccacattgcacacctgcaacaggaggctcactgggcattgtgtgaagtcctggagccctggtacccagctagccaaggccgcctggcccgaatcctcctcatggcttccaccctcaagaacatctcctgtacccttctggtagatctcttcttccgccctgtcatcggagatgttgacatcactgaactgcttgaagacatgcttttgttgaggtgacctgtagaatggggtccggtgcctccaaaggggagcctgaaaggccgcactcagctcccctggagcagccctcgtctcagccccacccccagcttggatttcctcggtttgcatacagtgtttgactaactgtccagcaggcccttgatggctcccaaaacctccaggccaatatgccttcccttacctgggtagggatgggagcatgaggctgtgcttcagggcagaattcctccagactttatatagaactaagttaagttattggtttttgtaataaaaggtgtgaactgc

SEQ ID NO: 638 - DNA, 8377 bp, Rattus norvegicus (Norway rat)
aagcttgcttctaatttccaaaatgttagagttggtttttctggagaatctcaggattaacaaaacaaagacacaaaaagtgaagtccttgttgagatcaaaagtcactttagagtaggagagatggccgggtggttcacagtacttgctgcccttacagaggacctgaattcagttccctacatgggcagctcactaccccctgtgactcccagtcatgggggacccaatgccctcttctttcttctcaggcatctatatgcacgtggcatgaatacatacatacatttacttgggtctacagacacacataaaataaataatatgttttcgttgttgttgtcttttccagacagggtttctctgtgtagccttggctgtcctggaactccctctgtagaccaagctggcctcaaactcacagagatgtgccagcctctgcctcctgggtgctaggctcaaaggcctgcctgtaccatcactacctggaaaacagtaaatactttttaaagaggtattttaagaagtaaatacttttaacaataacaaaaaaggacaactagaactacggaggctttgaagaaccacccagcatgtttgtgtattctctgtcctgtaccaaaggtccagctcgccaggaattcggagggtaattgtccaagtcctcccctctaagcttcggtgggttatctgccgttatagatgtgtcagagccatgtgtcctgacttcagtctccggtactcaggcaccaggaagtcacagtgtggcccaggttctaggagagcaccaaggaggcgccagaggtgggtgctgcactccatgagaccctgggcagaaagcttcatcctccagctcacattccccgcctgtaagactggagccatctatcccccactgtgacacatggggatgaaccttggaaaagtcagtctaggcaggtgttagtaaaacaaacaggactatgtacataaaggattgagaaaaccagtcatccttagagttccgggaaggtagactcaagtatgtagacttggggcccggatgggtcaatccctgggtttgcccaccagcatctcacagctagaattgtctcctagttctggaaccttccagattcctgagaggctggctactcctgccttcctatcactgaatagagtagagggttctggaaaggacccaaaaaattctgctaagaggcaattcactcagatttcctttttttttttttaagagcttgccagagtcatatgatttatccccatacaggccaggccgaccagcctcggggcggggtgttgcaacaacagccagaacgccggctcagctgggcggccaccacgtgactcgagtacttaaagggctggcgcgggcagctgctcgctcacagtcgccagtcgcctccagagtttccgcctccaaccagcgagtggagcctgccggagcagagccatctcgagcggagcccggagcctgaagcgagcggagccagcctgaactagcccagtcccgcgatggagcgcccacagctcgacaggcaagcgactacttggggacgggaactgtgatgtcccgcgtcccttgtccagcctagaaatgcaggctgcgggaccaaggaacgagttgccgcccagtctacctgtagccatgggcagctggagggagaaaatgtgattcacccctctgacacgctggaggtgaccggatgggtgtgtcttgtagtatccaggtttgagggatgaacagtgctgagtcctggatcctggactcaccgttctagggggcgggggttggggagcttggccctcttggtggcgcggagtggtcacatcaattcccaacttcagacgacttgtaagacgcagggaggcagccgtagcagaactagagggtgttgaggctgggtgttttttgtttggggatgggggggacaggaagttttttgtttgcttggtgttttgttctgttttgctttggggtccctgtgtagatcaagttggccttgaactccagttcgcttccctttgcttcctgagtactgagattgaaggtgccccgccaccacacttggcttctattcctcctcctcctcctcctcctccttctcctcttcctcctcttcctcttcctcttcttcctccttctcctcttcctccttctcctctttgattttttttgagacggagcgcctctttgtagccctggatgtcttcactctgtagatcaggctggcctagaactcggagatctgcctgcctctgcctccctagtgctgagattacaggcctgcaccactctgtccagctcttttttctttttttccttttataaagccagttttatttttatatttttatttaaagcgtctcgagttacatttaatttatcgtgcatgtagagtggccacatatatgacacactaaatatgtggaggtcagagttcgacttgaagaaagtcacttctcagtctaccatgtggcttccaagaaagattggcttatcaggtggcaagtgcgtttcctggctgagcttacactgtctagtcctcacctccaacttttagcagtaaggattgaacttaggacttcaaacattctaggcaagcgctttacccataaggtacagtatcagcaccttttttatttaaagacagtgcctaactaagttgaccaggctggtctggaactcttgaatcttctgctgcagaacctctctaaataaagctgggttacatagactatttaatgcagaaactttgagtatagtgtatagttggttttggatgggttttttgtttgttttttgttttgttttgctgagactcttcctacatagccctgtgctgaaattcattcactatatagatagacccaggttggctttaaactaagagatctgcctacctccacctcctgcatgctggaattaaaggtgtgcaccatcacgtcctgctgcttgtaaaatctgtaactgaaattttttaagaaatatcttcaggttggatctaaaagctcaccaaagtatctacccttagccgggctgtggtggcccatgtctttaatcccagcactcaggaggcagagggaagcacatctctagagttctgggccagcctgctctacagagtgagatccaggacagccagggctacacagagaaacgctgtcttggaaagagaaaatctgcccttgagtatggtccttggactggcgtggctcttccctgaggtcaggacataccttgcctcctcttcactgggaataactggcgtaggaatcctccctggggttttggggactacgtcacatagtgtttaatgactgacatctgtttgcatggttaagatcatggcttggcctacattggaggctggagctattctgcaggtctaatcattcataggcatccccggctgactctcctctcttcctccacagcatgtcccaggatttgtccgaggccttgaaggaggccaccaaggaggtgcacatccgtgcagagaattctgagttcatgaggaactttcagaagggtcaggtgtccagggaaggctttaaggtacgtgacgtgtaggttgaccagaccactggggtatagcaggtatacccagggcttaagccaatagtttaatggggaggttggtgccaggagtgatgagggcctgtccaaggacgccatcttggtaatgctgaccctgtagctcagagaggaaagggtctgctggtggaggagctggtgcagtggggtggttaagtgaacacgtattctatgttggtcattttatgttcttgaggagtgcctaaggagaaggaacagagaggttaaagaggccatcctgtcagctttcagtggaaaagaccaaaaccaaagatggccaaatttcagagcttgcgctcttgacctggttaccgcagggcctcatacatgccggctaggttctctaccactgacccacaatccaagctcttaggttactagatcgggtctcactacacagttcaggaactctcaatactcctgcgtcagcctcccgggtatttggaccatgggagacccaaatctcctgacccaatttcaacttgcctctgaaggaaaggagaagtttgccttagccctgcagtgtcctgttcccacagtgagattggctacctcatttaacctcccaagccctcttgcctgaggaatggggttttgacagctgggctgaaatgcacagtagacacaatagaccctgtttcctgccagctgtggaactgatgtctgcagcaaacatcagacacagggaagagagcactgactgggtggggagtggagggtggtggagacaggagaccgtccttccagaagggttcttctagcgacaagttgattctgtttttttcagctggtgatggcctccttgtaccatatctatacggccctggaagaggagatagagcgaaacaagcagaacccagtctatgccccgctctacttccctgaggagctgcaccgaagggctgccctagagcaggacatggccttctggtatgggccccactggcaggaggccatcccttacacaccagccacacagcactacgtaaagcgtctccacgaggtgggaggtactcatcctgagctgctggtggcccacgcatatacccgctacctgggtgacctctcagggggtcaggtcctgaagaagattgcgcagaaggccatggccttgccaagctctggggaaggcctggcttttttcaccttcccgagcatcgacaaccccaccaagttcaaacagctctatcgtgctcgcatgaacactctggagatgacccccgaggtcaagcacagggtgacagaagaggctaagaccgccttcctgctcaacattgaggtgagccccactgttccttcaagccccattcattccagttattggaggaagggtccccagagtcccagttagtacaaggacttggggccagccagggtcctgttttgctgcttaactagctgggtgattgtgggcaaatctcttcatcctcaggttctaaatctccaaaatagggataataatagcatccatcttcaaggcgagaggggcaagcaagttgtggttcagtccctgtgggaggagtgatacaggggaagttccctgatgtcattgctctcttgtgtggtgggctgtgatcctctgacaatggtgtagctggacctggggtgcctgagtactggtgcatggccaggccagcacagtccaggcttcggatgctgacatgtcccaggtggcatttgcttccttttctttgatttgcattgatgtgttgcccacgggtatatctgtttggtgtcagattcgttgggggtggagctacagacagctgggagctgccacaggggaaccgggaattgaacccgcatcctctggagagcaactaacgctcttaatctttgaactatctttagctcggtgttttgagcaaggccccgaaaggcagagctgggggagtagactgtcctatttatactatgggtgctatggtggtcagggttccaatttgggacctcctgtctctccccactttcagcctgagagcctttaaaagttccaccaggcaagcacctgttagagaagtaaccttcagatgtcctaaattcatctaggcccgttcacctgaggccttccgaggacatgatataaagaatgagtttagaagtggggaagtgatggcccattcctttaatctcagcactcagaaggcagagacaggaggatctctgtgagttccaggtcagcttggtctacacagctagttctaggacagccgaggctacacaaagaaaccctgtcttgaaaaacaaaacaaaacaccaacaagaaaagaggattagacacaggcccagctgagaactgggtctccatcctgacccctagtcgatctcaagaaagccctgctccaggagctgtggttccctgacctgcaaaagcagcgaccatactccattacacgacacaccgcctagcaaggaggagctcaagtacagtcatgaagagagcacgggatgtaggctgcacggctcccacacattcgtgtgttatttccgaagaggcaaactggttctcctcatagggatacagaaaagctcctgaagtctttattcagggcagccgttactggtggggtccaagcgagggtacagacagtatcggggacgcacaggcagggagccaactaaacctgtcacatctcatgagataagtgaaagacgcggtatgcgatagtttcctcaagtcgtgtcatttgtacaatatttcccaacaggcttcaagctgtgccttcccctgggtccccccacattgtgagtatcactaacaggcagtgtgtcttgtcttgtcttcagctgtttgaggagctgcaggcactgctgacagaggaacacaaagaccagagtccctcacagacagagtttcttcgccagaggcctgctagcctggttcaaggtaaagatggcctcttggcttctgctctccttagcccagctggaatttctttactcttctccattctgaacgttttaaattagagatagggtgcagacaaaagagcccagggtaagtctgtagtatgactgtgggtaagctatcagacttttctaccttagtttctccacattagaaaatcaggaggttgggggctgtgtagctcgttggctgaggggcatataaagccctcagaagtcactggcacagagatcctctcatttagatcccgcctcccacttcttttcccccaaggcagagccatgctgcatgacccaggctggtctcaaaccctgggagtcaaacaatcctcctgcttcaatctttcataaaaatctagggtgtgtttaccttttgaggcccactcaaggctcccatgcaggccccatatgaggcaaggatttgggaagctatttctagcgctgaccctccaggagacacgacggagttcatgtaattactggagtgtcagcccttttcctgtgccttgatacactacccttggagcaggagtaagggttcttaaaaagaccaaagtggcagaaaatgtgccttccctgagcctatcacccctgggacagtatggcccagggagtgggtgactgaaactgagcagggcaggttacgtgaagcttgattgcttgaatgggcccaccttttgcccaaggctctcccaagggaggcaggacccgccaccttgtcattagtggtactgtttctggtgggctgaaatatggtcagtgctgatagaattagttacctgtttgggtctggagtctttgacctgctgcggcctggcggagcacaggaggaacagcgtgggggagttggtgagctcctatctttgaaggtgtttaagcagtggctagtggttcaagctgtagcagaatcctggccttggactggaactgtagcagacacggcaccgagtgtcctctgctctgtgcagtgtcatccaccccaggctgtgtgtttgaccttgtctgtgtttctcctacagatactacctctgcagagacgccccgaggaaaatcccagatcagcactagttcatcccagacaccgctcctgcgatgggtcctcacactcagtttcctgttggcgaccgtggcagtgggaatttatgccatgtaaatgcagtgttggcccccagaggctgtgaactctgtctcatgtagccttctctctgcaggggagaatcttgcctggctctcttttcttgggcctctaagaaagcttttggggttcctcgcccccttcctgtgtcttcctttgtctctctggaatggaaggagatgcctggcacatttccctcaccaaaagcacagccaggggcctgaacttggaaaccagcagccccaaatcctgcaacagagccccagaactgtggtcggtagaggcggctgttctgagcccagtgcccttggtagtcggcgtccatgttgactgaccatgactgctttcccccagcgtcatggccactttgatatcagtgtgcagagattttctgtcttgtgtttctgtcttgtttttgttatttccccagttctaccagtgtaatggtattttttgttgtatcgattgtttttttattctaaccaagtagggctgtcttttgaggggtgggtggtatttaataattgtaaccttggtctctaacttctgtgtgaaataataaatggcattatctaataatcaccggaagttcgttcatgtctctgccgtccacgaacagggccctgctcctcctgtctcttcagtgtctggcaggaggagggcaggtggtggtggcatcagtagctttgacggtccactgtgtctgagagttggaagtgagcttcaagcatttgggc

SEQ ID NO: 639 - DNA, 1937 bp, Rattus norvegicus (Norway rat)
ccgacgtcccctcagattccatcgcgatggcccctccatcattctttgcccaggttccacaggccccgccggttctggtctttaagctcattgcggacttccgggatgatcccgatccccgcaaggttaacctcggcgtgggagcgtaccgcacagatgactctcagccctgggttttgccagtagtgacgaaggtcgaacagaagattgctaacgaccacagtctcaaccacgagtacttgcccatcctgggcctggcggagttccggagctgtgcttctcagctagtacttggggacaacagcccagctctcagggagaatggggttgggggtgtgcagtctttgggagcgaccggtgcacttcgaattggagctgacttcttagcgcgatggtacaatggcacagacaacaagaacacgcccgtctacgtatcatcgccgacctgggagaaccataatggcgtgttttctgccgctggttttaaagacattcggtcctatcgctactgggatgcagagaagagaggacttgatctccagggtttcctgaatgatctggagaatgctcctgagttctccatctttgtcctccacgcctgtgcacacaacccaacggggaccgacccaactgaagaggagtggaagcagatcgccgccgtcatgaagcgccgttttctgttccccttctttgactcagcctatcagggctttgcatctggagacctagagaaagatgcctgggctattcgctattttgtgtctgaaggcttcgagctcttctgtccccagtccttctccaagaacttcgggctctacaatgagagagtggggaatctgaccgtggtcggaaaagagcatgacagcgtcctgcgggtcctttcccagatggagaagattgtacgaatcacctggtccaatccccctgcccagggagctcggatcgtggccaccaccctctccaaccctgagctctttaaggagtggaaaggaaacgtgaagacaatggctgaccggattctgaccatgagatccgaactcagggcgcgactagaagctctcaagactcccgggacttggtctcacatcactgagcagattggaatgttcagctttactgggttgaaccccaagcaggtcgagtatttggtcaacgagaagcacatctatctgatgccgagcggtcggatcaacatgtgcggcttgaccaccaagaacctagattatgtggctacctccatcaatgaagctgtcaccaaattccagtgaagaaacaccgagtagttcataccccaaagcagttcctgtcacagctttcctgcctgcgcaaacctagccgtacatgttgtttattagagatgaccaccatggggaggcagccgctgtttagctggccccacaagagaagacatttcttgaaatgaacctgggtcgggtggggggatgactggggttagggccttttggaaaccagagcagattaaagttatttaagaataaaaaaaccctttgatatgagatgtaatcatcttgccttcctctgtagtattctgcaggagtgttgcccacgaagccgtgggcttctgcacgttgcttgagtctgtacagagtcctgtccccaaaatcaagttgtctgaggagccggctgtgactgtggatgttggcattaaaactcaccatttccatcgtctctgtctctcggccccctgatctttccgcatggttgtgaccctggtcttggaacattagttttttaaggccactgtggccagtatttatatcatgacacacaagtggatttacatatttaactgagatgaaagttccgctaaacggtatttgctcttgtgatacgtggcacattgtgacattttcttagtctcttctgtcgtgttctgtttcatttaaaaaaataaaaatgctgatcaagacaaacgg

SEQ ID NO: 640 - DNA, 409 bp, Rattus norvegicus (Norway rat)
tgcaactgaaatgcattctctagcttgccagtggcccccactgcctgcctgcctgcaggaactactctagacatagattcctcctccactctagcaagagaagatgctgtctaatttgaggatcctgctcaacaaggcagctcttagaaaggctcacacttccatggttcgaaattttcggtatgggaagccagtccagagtcaagtacagctgaaaggccgtgacctcctcaacctgaagaacttcacaggagaggagattcagtacatgctatggctctctgcagatctgaaattcaggatcaaacagaaaggagaatacttgcctttattgcaagggaaatccttagggatgatttttgagaaaagaagtactcgaacaagactgtccacagaaacacgcttcgct

SEQ ID NO: 641 - DNA, 2237 bp, Rattus norvegicus (Norway rat)
gccagcttcctgaggtaccaaggaggaaggatggaggaaagaatgaacgtgctccacgactttgggatccagtcgactcgctacctccaagtgaattacgaagactcccaggactggtttgtcttggtgtctgtgatcgctgacctcaggaacgccttctatgtcctctttcccatctggttccacattcaagagactgtgggcatcaatctcctctgggtggcagtggttggagactggttcaacctcgtctttaagtggattctttttggacagcgcccgtattggtgggtcctggacactgactattacagcaacagctccgtgcctctgataaaacagttccccgtcacctgtgagactggaccagggagtccctcgggccatgccatgggcacagcaggtgtatactacgttatggttacttctactctcgctatctttcgtggaaagaaaaagtcaacgtatggattccggtgcttgaatgtcgtcttgtggttgggatactgggctgtgcagctgaacgtctgtctgtcccggatctaccttgcggctcactttccccatcaggtggtggctggagtcttgtcaggcattgctgtggctgaaactttcagccacatccggggcatctacaatgccagcctccagaggtactgtctcatcaccttcttcctgtttggtttcgcacttggattttacctgctgctaaaggggctaggggtggacctcctgtggactttggagaaggccaagagatggtgtgagcgccccgagtgggtccaccttgacactacaccctttgccagcctcttcaaaaacctggggaccctcttggggttggggctggccctcaactccagcatgtaccgcaagagctgcaaaggagaactgcgcaagtcgctcccattccgtttggcctgcatcgtggcctccttgggcctgctgcatctctttgactcgctgaagcccccgtcccagattgagtcgatcttctacatcttgtctttctgcaagagtgcgaccgtcccctttgcatctgtcagtcttatcccctactgcctagcccggctcctgggacagacacacaagaagtctttgtaaagcgttaagtctctgacacaagtcagcggccgtgcaaaggactaggagcaacccaagccttgtgcaacccagtgtggggccagaggtgttcacagccaccctggtagccctgtctttctttgccatcgtaaccaaaaaggtgaatttttaaaagctaacagggctgtttgaggaaagcgtgaatgctggaagatgtttccctgatgaatcacttccggtctcctgtccgacacagaagagaaagcccagactagagatcctgacagaatgctctcactgtgcagaatcctccaggccgagggtaaaagaaaagagcgttgtgcatttgctaggaagagaaggaaggatcgggaggagggggagtgtttggtggattgagcaaaccatatgcaagccatgtctacccggcttcagttatgcctgggtctttagatatgtaggacactctcaataatgatagaccagcccgtgtaatgagtagccagttagaggcgatcattctgctcccagatttttctctactgtacatgaaagtcacaccgtgtgcttgtattcctgaatggtaatggtgactgtcactcaggaaccaccaccttctctgtgacaccacagctttgcctcctcggcccaggtctgcgtgccataggactcatcactgcttccctgaccacgctgctggaccctgcattgctgaaccccatgctgctggaccctgtggtgtacggtgggcaattgtttgctggtgcttttgtagggttaagttaaactctgagatcttgggcaaaacggcaaggggagagtcaggattcctctctccaaaggtcactccgaagttacttttgattcctggagcagaaatgactccttcctctagcccaagccagccaagaactcattcttagaggcaaagcagcccaagcccgactgtgcctgtcctccagcctgggctggttttgcagagtgtgtcttcaagaagaaaaaatggtaaagctatttattcaaaatgcttgttttttgctatgaatgatgcctgtgtttccacccacgccaagcacttgttcctattgtcttgataagaaactacatgtgtgcagtattttattaaaacgacattttatttaaaaaaaaaaaaa

SEQ ID NO: 642 - DNA, 2335 bp, Rattus norvegicus (Norway rat)
ctccagtggctgagtgatcaactatactcgatgtatcttccagggcttctgcagaagtgcaagatgtcttcatgacctacaccgtgtatgatgacatcatcaccattaagctcatccaagaagcctgcaaggttctggatgtgtccatggaagccattctgaagctctttggcgaatacttctttaagttctgtaagatgtctggctatgacaggatgctgcggacacttggaggaaatctcaccgagtttattgaaaacctagatgcactccacagttacctggcactgtcctatcaggaaatgaacgcaccatcctttcgagtggaggaaggagctgacggggcgatgcttctccactactactcagacagacatggtctgtgtcacattgtaccaggtatcattgaagctgtggccaaggacttctttgacactgatgtggccatgagtatcctggatatgaacgaagaggtggaaaggacagggaagaaagaacatgttgtgtttctggtcgtgcagaaggctcacagacagataagaggagcaaaggcaagccggccacaaggcagtgaggacagccaggcagaccaggaggctctccagggaacactccttcggatgaaggagagatatttaaacatccctgtttgccctggggagaaatctcactcaactgctgtgagggcatcggtcctttttggaaaagggcccctcagggacaccttccagcccgtctatcctgagagactatgggtcgaagaggaggtgttctgtgatgcttttcctttccacattgtctttgatgaagcactaagggtcaagcaagctggagtgaatattcagaagtatgtccctggaatcttaacccagaagtttgcactagatgagtatttttccatcatccaccctcaagttactttcaacatctccagcatctgcaagttcattaacagtcagtttgtcttgaagacaagaaaagaaatgatgcccaaagcaaggaagagccagccgatgctcaaactccggggtcagatgatctggatggagtctctgaggtgcatgatcttcatgtgttccccaaacgtccgcagcctgcaagagctggaagagagcaagatgcatctttctgatatcgctccgcacgacacgaccagggatctcatcctcctcaaccagcagaggctggcagagatggagctgtcctgccaactggaaaagaagaaggaggagttgcgtgtcctttccaatcacctggccatcgagaagaagaagacagagaccttgctgtatgccatgctgcctgaacatgtggccaaccaactcaaggagggcagaaaggtggctgcaggagaatttgaaacatgtacaatccttttcagcgatgttgtgacatttaccaacatctgtgcagcctgtgaacctatccaaatcgtgaacatgctgaattcaatgtactccaagtttgacaggttaaccagtgtccatgatgtctacaaagtagaaacaataggggatgcttacatggtggtgggtggagtaccagtacccgttgaaagccatgctcaaagagtcgccaattttgctctggggatgagaatttctgcaaaagaagtgatgaatcctgtcactggggaacctatccagatcagagtgggaatccacactggaccagtcttagcaggtgttgtgggagacaagatgcctcggtactgcttgtttggtgacactgtaaacacagcctctaggatggaaagtcacgggcttcccagcaaagtgcatctgagccccacagcccacagagccctgaaaaacaaagggtttgaaattgtcaggagaggcgagatcgaagtgaaggggaaaggaaagatgaccacatactttctgatccagaacctgaatgccaccgaggatgagataatggggcgaccttcagcccccgctgatgggaaggaagtatgtactcccggaaaccaagtcaggaagtcccctgctgtcccgaggaacacagaccatcagcaacaagtctacaaaggagacccagcagacgcttctaatgaagtcacacttgctgggagcccagtggcagggcgaaactccacagatgcagtcaataaccagccatcaccagatgagaccaagacaagtgtcgttgctagtggccctgtgctgtctgctttctgtgttgtgctgtgatcacgagaaaaagtgatcctatgggatccatttcctgtattccatggcagcaaagggaattaatttataaaaatgcttaagttcaaaatgtttttgtttccatatctcccttggggcccctttgagaataaaaaaattag

SEQ ID NO: 643 - DNA, 2519 bp, Rattus norvegicus (Norway rat)
agagcccgtgaggcggccggaccatcatcgtcctgctaatacagctacttcctcaaccaccggtatgagccacgggaagagaaccgacatgctcccggagatcgccgccgccgtaggtttcctcaccagtctcctgaggactcggggctgcgtgagcgagcagagactcaaggttttcagtagggcgctccaggacgcactgaccgatcattacaaacaccactggtttccagaaaagccatccaagggctccggctatcgctgtatccgcatcaaccacaagatggaccccatcatcagcaaggtggccagccagatcggactcagccagccccagctgcaccagctcctgcccagcgagctgaccctgtgggtcgatccctacgaagtgtcctaccgcatcggggaagatggatccatctgcgtgctgtatgaggaggcgccggtggccacctcctacgggctcctcacctgcaagaaccagatgatgctgggcaggagcagtccatcgaagaactacgtgatgactgtctccagctagagaggagccgccccgccctggcactctactgttctcatgctgccctgacaacaggccaccgtatacctcaacctggggaactgtatttttaaagtgaagagctatttatacatgttatttttttttttaagaaaagaggaggaaaaaaaccaaaagtttttttttaaaaaaacaaaaaagaaaaaacaattcgttaacgggagctgcttggaagtggtctccccaggtgcctttggagagaactgttcttgattgagtctatgagccagtgtttgcctaggggagtgggttggggattggcctagccaaggtaaaaggggattcttggctgatcccccaggaggtggtggaagggagcaaggttagcaactgtgaacgagaggggtcagggtctgctctgggttaccgttcccgctgggatgcctgtattcctggtccctctcttactcaggggcattcaagcctggtctcaaataatactacattgcctaatcttctcttttgtttttctgctgagatcctgggcacacggaaaggcctctcctgtcccttccgtctgagcagagtttcttgaaactgtgtctcgtttctgatcctaccctcggggtcctgaagaggtggtttcccggcctagaatctatctaaacgtttttggagggtgggctataaggcagatataatggaggggaaccgcacaaaccctttgctttgctctgtgctgctttgtatggatggatggttaataacttagggatgatttgcaatggaattttgggacccaaagagtatccaatgggggtgggtgttttggacctaagccctccttttgggaaccacgtgacagtctgaatgctgctaccattattcctttgagaggtggctcaaagctccagggaactccaggtcctttcttactgccttctcttcaagagcaacctcccccatttcttttccctctttcctgcggttgggtcctggagggccccatttcctaggacaagagttctcaatcactgtgcaatagtcccaggaagctctggaactgggcctcccagcccctcctgattcctggtgggttttaggaccccgccttccccgttcttctgactggctggtgggccttgaggagatctccctcggccgcagggagggcacctgtgcactgcaggactacctggtactcctgtggggctgccacggagagccaaaccttaggcatagctttgtctcctcggtgctcagagcacctgcagggggaggttgcccccctcagtaaaaatccaaatttatttgtagatgtgtgcaatatttactgttctgggttggagaaaatcgggaaacactgggaagaagtggccttccttcaggttcagtgacactgatgagggcttctcagaaggcctcgagtctctcaaaccaaaggacagagctagagccagccagtcacccttagtgaggatccccttccccatgtctctccactgccgtggcatcccatgtcctggatttctcaattcctcagtttctactcaaaggtgctacttaccaaacactctgcccgtcccgctctccccagcttcgcacagccgtcccaggtggcttcgtctctcctgctttaaagttaactttgggcccacagacccgagagctgtgggttgaagcaaagctgtgaatcgctccagatggtccctgtgttctgtccacacacaggtccccgcctttttagaagcagcctcctggtctcatgcttaaatctgttcctcactgcccgtgttcactttagaaatggcagaaccacagagctggactgttgagcaggcctgtctctctcattaaatagaaataagtaagtttgtaagctattccgacagaagagacaaaggttactgattgtacaatagcgcttttatatggaagactgtacagctttatggacaaatgtaaaacttttttgtttttaataaaaatgtagcagacc

SEQ ID NO: 644 - DNA, 2563 bp, Rattus norvegicus (Norway rat)
cggaacagtctaagggtgttcactttggggactcagtgagtccccctctgttatggagtacagtgtctcttgaatcttacttctggaaatccacggacaagaagactggtgacctatcgattttgtgatgcccacccctggctcctggttccctctctagaggcagaagagccaggcgcagctaatgggacgctttcggagatgctgcgtctgacaggtgcgaagcaacatgtgcaactcctttcttcttcctcccctcagatcctcctccatcttcacccatctttagaggaagagcctacagaaagaagatggctcctgagcaaagagaaggggcctctcaggtgtcagtgacatttgaagatgtggctgtgctctttactcgggacgagtggaagaagctggatctgtctcagagaagcctgtaccgtgaggtgatgctggagaattacagcaacctggcctccatggcaggattcctgtttaccaaaccaaaggtgatctccctgttgcagcaaggagaggatccctggcaggtggagaaagagggccccagatacttctctctcggattgaagtgcagtcatagaaccactaagtcaactcaaacacaagactcttcatttcaggaactgattgtaagaaaatctaaaagaacctttgccttcgaacctttgaacatgaagtcagaaaatcttttcatacatgaaggcaaattagaggaaaagtgggataagaatactttgactgtagaaagaagccataaaaacaatgaatttagcccaaagtcccatagagaaaaacggtcctcagaatgtaaaaagcagatatcttatttatctaacccaccaggaatcacaccggataaacgctataaatgtagcatgtgtgagaaaaccttcattaacacctcatctcttcgcaaacatgagaaaaaccatagtggagagaaattatttaaatgtaaagaatgttcaaaagccttcagccaaagttcagcccttattcaacatcaaataactcacactggagagaagccttacgtatgtaaagaatgtgggaaggccttcactctcagtacgtccctgtataaacatctcagaacccacactgtggagaaatcctacagatgtaaggaatgtggtaaatcctttggccaaaggtcaggtctttttatacaccagaagatccatgcccgagaaaaccctcatagatataacccaggaaggaaggcatccgcttccctctctggatgccagagagctcattccaggaagaagacctacttgtgtaatgaatgtggcaacaccttcaagtctagctcctccctccgttaccatcagagaatccacaccggagagaaacctttcagatgtagcgaatgcggcagagccttcagtcagagcgcatcacttattcagcacgaaagaatccacacgggagaaaagccctacaggtgtggcgagtgtgggaaaggcttcacttctatctcaagactcaatagacaccggataattcatacaggagagaaattgtataattgcaatgagtgtggcaaagccttaagttcccactcaactcttattattcacgaacgaatccacactggagagaaaccgtgtaaatgtaaagtttgtgggaaagccttcagacagagttcagctctgatccaacatcagagaatgcacactggggaaagaccctataaatgtaatgagtgcgggaaaacattcaggtgtaactcatccctaagtaaccaccagcgaatccacactggagagaaaccttatcaatgtatagaatgtgggatgtcgtttggacaaagttctgctcttattcagcaccgaaggattcacacgggagagaaaccgtttaaatgtaacacatgcggaaagacctttaggcagagctcctcacgtatagcacatcagcgaattcatactggggagaaaccctacgaatgtaacacgtgtgggaaacttttcaactataggtcatcccttaccaatcattataaaatccatgtggatgaggacccttaaaaagtaaatttgcatgtaaaaaagccttaaaccaaagctcttcagagaatgggcttgagagctgtaataaacatactatggcgtccctgtagtcatttagttactgtcaactaaattccatggataaatcctgtgtaacaggtaggagtgaaatattcatgcctgtccaacactttaaaaaaattgcttgaaatccggtggttatgtgtagtcctggctaccggggaccctgaggattgcttgactccacaagtttgaagagcaaatgttatggagctttccatctcagaagattagtgacctgaaatgaagaattcacagctgaaggccttgacttcaggtatttggaaaatggtgcttttctctctgcaacagtgtgtgctagatacaattgtaatcataggcatctaagtgaacagaggagtgggatggacttagcaaaacacaaaactctactgttgtgatacttttatactattttaataatatccaaaagggatcaacacaaatcaaaaaaaaaa

SEQ ID NO: 645 - DNA, 499 bp, Rattus sp.
ggtaacccaaccaattctttattgtaaagatgagtgctacaaaggaggcctagtgtgtagggagtggggggtcaccttctttcaagggactccacaaggtccactagagatgacatatagccaaggaataagcctgagccagggcagcagtggttctgaactctattggaagttggggttctgaatcaagcccactgacccaggtccatgaggaagtgttcaatgtcatcgtagagactattggtgctagacaagcacaggccaagactgctgctgtccagagaggacacaccctcacgctgcacgccttccagatgtgtcttgcacagccatggctccagcttcaccaggatcaggctcttctccttgggcctccctgctgacaagtcttgcccaaaacccaggtagatggtgtaatgtggtgatccttgtcgcctccgggcccggaactcctccagttctcggaagaaatgctgaagtcaaagatgggagtatggca

SEQ ID NO: 646 - DNA, 452 bp, Rattus sp.
aaaacatgattacaagaaaagaatacttcatttacgtgtaacactgtcttcatggacgtaccgtggtcacggagtagaaatacaacatgagtatacaggaaaggagaggagagaccggtgtttggccctggtggccccctcacagagacacagaaagcagcagacacctctgtgcattcaatgggacagtggacacttgtgtttggagcagccagagagtcagggaggatgggcaaagccacctctgggaccctaatttcgtgtggtaaccccaaagagatactggtctgcactggtggaggctggctcctgtcaggttcttcgcagccttcagggacaagctgaggctcctgagtgcccagtggtttgtcgcatagcttgctgggcccatgggctccatggtgtgaagagaaaaaaggccaaagtgggcgactggctgatctctaggtgac

SEQ ID NO: 647 - DNA, 605 bp, Rattus sp.
cctataataactgtgatgatttattccatcatagagattaagatcacatgtatgttacatacaatacagaataatgtgtatgatgactatataatacccctgtacatatatttctgtatctgtacatacaaccagcaaagagaaaatctacatctgtgacctaagacacagaattcacaccctgcttctccagccaggctaacagtgagatcacagtcagtttcctgagtgctggggccaggttagagtccctgtaaccaacacatacaaccttagaagagctttaagaaaacacgcttgctttctcacagtcaacctactggagcgggatctgtgctataaacgtgacctcaagaattatttctgaatacccatgtacatcataaggatgggaaacaaagcctctgatttcattgcagacctttcctgtgagtccatggaaccacgttaacaaaagaacgagcaggcagaaggggagtcttagcagaacttggttcacccccaatcccactgccgtgagacttctcagttcaacctatccttacccacaccatataaagtaaacccaccttttacatttaagtgatgctttttcataaagtacc

SEQ ID NO: 648 - DNA, 612 bp, Rattus norvegicus (Norway rat)
tttttttttttttttttaaatgtcatcatcatagtcttttaatattttacataaaaaactgtatacacagcttatagaacttttatgtaaacatcataagctcaccactttgtcatctgtcagtttatttaaaaaaaaataaaacaaaaacaaaacaagacaatttagtagaagtaccactgggctgggaaaggagggaataaggaagaggaagctttgctctgcacagagaatgtacagaaaatttcacatagatgaagagacttgtcttgtggggagagggagggaggtttaaatagaccccaatacgtgttgccttcctttaccaaaactgtgtgtatgctacacaaatttttaaaaagtcacatggttgacatttttttcaagaaaacaaggcaaaaattagaatcttttttgtaatctccttaaagtcatcatagtttgtttaaaaaaaaaaacatcagaagtagatgaggttacagcatacaagtgtggtcaaaatgctgccttatgcaaatgacaagtgcactgggtgtcaaacaatgggacaattgtgcaaagaattctttcatcaacaacaaaaaaagcttcagcctttaaataaattcagca

SEQ ID NO: 649 - DNA, 549 bp, Rattus sp.
agaaaagaatattttattgaaacagtttctcaattaacaatggaacaaagtacaatttgattcaaacctgtccaaccagcctgaactgctaatgaaagaactcaaacacacaggggggaactgtgtaggacctttaagtctctctgccaatgtggcaaaaaaaaaaaaaaaaaaggtggagaggggtgggggtggggtagaaaagacaaaacaactgacatcaggtttgctttgcccctgcactggggtggccctacctcctgctacaggtgcaatactggaggacaggcactctaggcatggttatagtgggcaaggggctctccttcctggcaaaggacactgtcaagttgaaccctgacccctctttctttacccacaaagcttgcctgagagtgaggtggcatttttacattcacaccatgatctctgtcccacagggtcttgggaaaggggctcacagtagatagcacatttttggtcagcccagggggaagaaggaaagagcctgaagggtagattttacaggaactggggatgaccaggatg

SEQ ID NO: 650 - DNA, 478 bp, Rattus norvegicus (Norway rat)
tttttttttttttttttgaatgtgttcattcttttattgtccattgtgttaacctgactgacacaagaccaacaagagcactgtactcctggcaatcattacatatgctagaacatggatttgcactgtagacaacatttaacaccagtctatggggtactgcattgctttttataaagttcaaaataaagattttattttcaaacaagtgactttggtttatttcatacattacactttttcttgcagaaaaaaataaaattgtacaactgcataaatataaaattcttccaccatgaaaatggttaaaacattcataaagacacagcaccagcacatgatgcctccagagaaaggaaagaaggaaaaggaaatgtactaagcaaattaactagccccatcactagccaaagtgacgggcagatccagatcagacacagcttcggagcacactggaggacaaggggagagatggcga

SEQ ID NO: 651 - DNA, 440 bp, Rattus sp.
acagtcatgacattatttatttacaagcacagatgaatccctgacctctcccaagacagtgaccctacctcagcccagttcaatacttcaactggaagtaaagccggaaggaggaattcagggatgcacagggttaggggaacatatcccatattaaatagttatatatatacacaacagttcctgtagttctgtacagagcagtggctgaccccaccccacgggacccgaaatgtggggagaagagactgagggtgttgaggccggagccagcccctggtgaagtgcaatagcagcagcaaggtcctaacggtacacaagagggaggggaacaccccctcccactttccacccccaccctgccctgggaatgtactgagggacaggaatggttctcaaagagcacatacaggaaggacatggctagaaccatctttagg

SEQ ID NO: 652 - DNA, 2462 bp, Rattus sp.
tgtgctgttggaaccatggcgcctgtctgcctgtttgcgccgctgctgctgttgctcctcggaggtttccccgtcgccccaggcgagtcgattcgagagactgaggtcatagacccccaggacctcctggaaggcagatacttctctggagccctcccggacgatgaagacgctgggggccttgagcaggactctgactttgagctgtcgggttccggagatctagatgacacggaggagcccaggaccttccctgaggtgatttcacccttggtgccactagataaccacatccccgagaatgcccagcctggcatccgtgtcccctcagagcccaaggaactggaagagaatgaggtcattcccaaaagggtcccctccgacgtgggggatgacgatgtgtccaacaaagtgtccatgtccagcacttcccagggcagcaacatttttgaaagaactgaggtcttggcagctctgattgtgggcggcgtagtgggcatcctcttcgccgttttcctgatcctgctgctggtgtaccgcatgaagaagaaggatgaaggcagttacgacttgggcaagaaacccatctacaaaaaagcccccaccaacgagttctacgcatgaagcttcttcccatgagtgctgcttggacttcatggggagaggagttgaggattgtggacagtggacattggcagagagagggcaccttaatactgacttgtatctccatctctggtcacctttctggtgtcagaagagatatgatcttctactgtgctgcctcagagagagagagagagagagagagagagatgggatggggtgcggagggagtgtccgtgtgtgtgtgtgtgtgtgtgtgtgtgtgtgtgtgtgtgtgtctgtctgtctgtctgagttgccctggcagaaaaatggggttaaacttgttctttcttgaaggcaagcctggaattgggtctttttgttgttgtttcaaatttctagaatagaatgtaggaccagtttagttcctgccgttaacatgtctcatttatgactgcctttattctagaggcaaggagttgggggcaaggagctggaacccgctgcaccttgagatgtgttcacccgagtacttcctcacactacagggtctctgtggtgtatctcggggcattctaggctcagtgacttttgaaattcaaccttttttttttttttttaaatccagggagggtgggactgaagtgctgacagctcatgctgaagtacacttgtagaagatttgtaaaatgtaaggttttttttttttttttttaatggtccattccttcatgggagcgtgtgccctgggctgagagcgtggggatgcacagatgttctttctagaacatattcgttgcaacagctaactttgtgttttcatggttttttatgttttgttttgtttttttgaaaatgagagaagagctggagagatgatttttatgatttttttttgttttgttttttactatttatagcttcagacggggctgcttttctctacctttctgtctttactgtttcccactattttttttttttaatgttctgtgctcttgtttttgaccctggccctttctgaagttgctttatcttaaaaagtagctacagtgttctagcagattccagaatataatgtagggggtagcgggatatttgtgttcttgtaatatatattatccttcctcggttctaggagaatagataaatatatttttttaggatatagaatgatactacaggtctcatgttggctgggtggctgcgtgagtgagttttcgtgcggctgagtaagctgttgccctcttctcttgccctgctcctggtgccttctcgagatcgagctggagtgactgagggtacctgactctaacctcactgtgccttctgccgggggctctgcccaggagcctctgggtttgctttctccaggctctctagatgcacgatccaatacagtgacctcctgtggctgtatcaatcagttcacttgactatgtgattggaaatcattcctctgttgcactggccacacaatttaagtgcctagtcaccatccaccgagcacagagattgaggctggtttagcaggttacggttcagttttgcttgtctccccgggcaagagaaggggacttaggaggaaggtgatgaggtcccagggactcctgtcacccaggactctccctcttacagaggaaagacctagtagcttaaaaggtctgggctgtgtgggggtggggcggtcataccactccctcaaccatgccctatgcctgtaagcccccatcaccacctccgtgcagggtcctagctggctgggtcctcttctagccttgtgcctgctccttttctgtatcccttactctgttgtctgttactgatttttttgataaaaagataataaaacctggtactttctaaaaaaaaaa

SEQ ID NO: 653 - DNA, 4056 bp, Rattus norvegicus (Norway rat)
  misc_feature (913)..(913): n
  misc_feature (1102)..(1102): n
ggatcccccctgcaacaatcagagatgctcagtgtgtcgtctttgagcaaggagtaccttcccagaaacatttattttcttaattcacgctgagccttttgctttaaagacgctgttctcaaacgttctaaaactcagtaggaacaagcagatccgaacaaaggcaaataaatcgaatcctgcaaagtaacaaagcagacgccttttcccaacagccagcacaaagctaaatgaaaaatatcagtcatccactagatacagtatttcccccactagacaggagctggggcctgtagatcccccctcccccaaacaggaggccgagaaggtacaaaacaaagtattcattcctaaacgagtcatcacttcgagctgcaccttctacctctccgcactcgcggtttgaaagacctcggctgttacttctctgtacctgcctccaaacacacgtggaggtggtggcgagagggagggagcccaccgccacgtatgcataaggcgagggaggaggggattggggctgagggcagttccctgaggacagttagtgctgcctaaagtgcaaggctcccccattcctctgtaccccgaaactggaggaaacagtgtgggggcctggggacgcctgtccacggtccaggcagagccctggaaccctgagctttgatgctgcagcagcgatcgcctgtgggcacctgggtttctggggggcggggcctcccccaggtgtgcggagagcgaaggccaccagagccagcccagaggaccccaggagcctcctccgggggacacggtacaaaagagcggctcgtcggtgcccccagcagcaggcaccgggccccacgggcctggctccgggaaggggcgcccgcgcggcggcaccgagggggttaaccgggcggcccgcggccgnagcgcgcttaaccctcggtcagccgcgccagcccgggggtggcggcgtccgagtcgcgcgccgtggagcccggggggcgcgtgggccgcaggccggcagctggggcgcggcgcggccggtgggaggcccgggcgcgcgggggagggcgggggacggcggcggcgggcgcgcagcgtcgccaggacgaanccggcgtgcagcgcggcgcggcgggcgcggagcgggcgggcgggcgggcgagcgcctccgtccccggatgtgagctccggctgcccgcggtcccgagccagcggcggcgcgggcggcgacggcggcggcggggcaccgggcaccggggcgggcgggcggacgggcggcatggggggcgcgtcgagcggccccggcggccgggcgggcaccaccgcggtgtccctccgctagaggaggggaccaagccaattctcctttgcagcaaaaaaagagaaaaaagaaaaaaaagaaaaatttacttgtatatattactaagataatatatacatctgattttattttttacaaaaagtttattttgctccatttttcaaaaaaagaaggagcgtgggtggcaggcggtttttataaattattcttattttgattatttgtctctgtccttccccaccccctgctgaagcgaaaatagggcagggaccgcggctcctacctatcagtaacctcccatacccgttcctccccctccctaacgctgagcatagtgccctgcacacagtaggcgctcaataaatgttcgtggatgatgatgatgatgatgatgaaaaaaatgcagcatcaacggcagcagcaagaggaccacgcgaacggtgagcagccagagcccgggtacccgctgccaaacctcatcctatcaggatcctactcttcccactccccaacccccatctccgatgcgttgggtgggttgagggggttggagatgatgcttttggcttggtgtcatctacatagaaaggggtgatgcgcggcagctacttcgttctcctcttcaggccctgaatgtcagagttaattctgcatttgctggggtggggcggccattgggtgtgtggagtactgtgcagccaaggggcgagagtgaggtgattcgggttcaagtgccctcgggctcaacttttctctttcattgcccctgagcgatggaagaggtgttagtcttcagcctgaaccccttttccagcctccccccccacccccacgcctctggttgactaagaggaaggtctttagtagcatcaggaaaattctaggattgctccgcttttactcgttgggtcacttggtaaagtgcacatccatcatctcatgggagaagccccccggtcttgggatctgggggaacagggtcaggtggagcgagtattcccgctcgctccctgtgcctcctgtgcacacgtcgtcggtaacctagcaatgcccagagagttgctgccgctgtggggctctgcaactcagccctggccatggcaccacgtgcagtttccacaccagcggggctgggtctgagaaggttgggttgcttttggctaggttccctccgtggaggtcgttggcatctcccaaccctgttttcttgaagccttttccggtgagcacttctcaaagggaaagcttggcaaaattagttcctgatctcagattgagtgccacctgcctgctttgctgctgtcccaggctcataggacagtggggcaggagacctgtgcttgctttgactctttgcttagtgataattagctttgcaaacgcctggatctccaacctctctccacccttctcactttgacatctgcttcagcagaggtgatgatggtggcccaacgtgggcacctgtgagaccgtctgagggatggccagacccatagtgaggcgggctccgcacatgaagagacccgacccccccccccccccccgcgccccacctttgagtattttgccttgtgtgtacctggatgctactctacgccgagataattcttgaataggccttgaggttccctggcataacgcaccctgtctcttaggtgtaggggtgcaggctggcttggctgctactgctgcaattaaaaaaaaaaaaaaagccctaaagatgtttttctgttttcggaagcttgtggaggaaatgagtcccaagcaccatgaattttcatttgtaggaagtgttagtgcataatctagatatttgttatggggcttttgctattgcctggtgccagtgaggagtttgttttttttttcttctacgtagaaaaaatgcatttatggctgtggagagctgttggaaggacaccctaaaaatggttaagactgttgaatttattggctctgtgtgtgtgtgtgtgtgtgtgtgtgtgtgtgtgttggtaataaattttagagaaaggcagctgtatagatgtatctgttaagccatgagagatacgtgtgttttcaaagtcaggaaaagacacaggataaattcgagaatagccccagtttgtcagaagagaggcactcatggcttccctttgaagacacaggtatgggagagtaccagtgtggctaggtgtggtgcagcaacgcatgtctagtgctcagggcagagctctgctgacttctgcattgcctggccaaaccccactacttgtgacacaaggttcaaaatgggaaacacaagatgggagacacttttgcttttttaaaaagatagtatagatcaaggtctttcttttttttttttttcttccccaaagaaaaataatctcttttctccttctcctcagaggcaaactatgcaagaggcaccagactccctatttctggtgaaggaccaacttctcagccgaacagctccaagcaaaccgtcctgtcttggcaagctgcaattgatgctgctagacaggccaaggccgcccagaccatgagcacgtctgcacccccacctgtaggatctctctcccaaagaaaacgtcagcaatacgccaagagcaaaaaacagggtaactcgtctaacagccgacctgcccgtgccctcttctgtttatccctcaataaccccatccgaagagcctgcattagtatagtggattggaagtatcctttttctgtgggaaagtctttcaaaaggatcc

SEQ ID NO: 654 - DNA, 2104 bp, Rattus norvegicus (Norway rat)
gcacgagacggggttggatctgaggtgcagcctcagagggattaggagctgctagacttttttcttttttcctttttctcctctcagtggcacggagtccgaattaattggatttcattcactgggtaggaacaaaactgggcactttcattcagagagattcattgactctgagagtgatctggtgcagagggaccaccggcttggcttctgtcgccttccctaaccgctagcttcggcttgggaaaggccgaatcaaacccggctccgagagccggagcttctcacggcttgcttggcctatgcctgcctcgaggggcgtctgctaggcaccccgccttctcctgcagctcgacccccatgatagatacgctcagacccgtgcccttcgcgtcggaaatggcgatcagcaagacggtggcgtggctcaacgagcagctggagctgggcaacgaacagctgctgctgatggactgccgaccgcaggagctgtacgagtcgtcgcacatcgaatctgccatcaacgtggccatcccgggcatcatgctgcggcgtctgcagaagggcaacctgccggtgcgcgcgctattcacgcgctgcgaggaccgggaccgctttaccaggcgctgcggcaccgacaccgtggtgctctacgacgagaacagcagcgactggaatgagaacacaggtggagagtcggtcctcgggctgctgctcaagaaactcaaagacgagggctgccgggcgttctaccttgaaggtggcttcagtaagttccaggccgagttcgccctgcactgcgagaccaatctagacggctcgtgcagcagcagctccccgcccttgccagtgctgggactcgggggcctgaggatcagctccgactcttcctcggacattgagtctgaccttgaccgagaccccaatagtgcaacggactccgatggcagcccgctgtccaacagccagccttccttcccggtggagattttgcccttcctttacctgggctgtgccaaggactctactaacttggacgtgttggaagagtttggcatcaagtacatcttgaacgtcacccccaatctgcccaatctgtttgagaatgcaggggagttcaagtacaagcaaattcctatctctgatcactggagccaaaacctgtcccagtttttccctgaggccatttctttcatagatgaagcccgaggcaaaaactgtggtgtcctggtgcattgcttggcgggcatcagccgctccgtcacggtgacagtggcttaccttatgcagaagctcaacttgtccatgaacgatgcttatgacattgtcaaaatgaagaagtccaacatctctcccaacttcaacttcatgggccagctgcttgactttgaaaggaccctgggactcagcagcccctgtgacaatcgtgtccccgcacagcagctctacttcaccgcgccctccaaccagaatgtctaccaagtggactccctgcaatctacgtgaaaggcacccacctttcctagccgggagtgtctcattccttcagtttctcttgggcagcatcgaccaggctgctttctttgtgtgtggccccaggtgtcaaaaatgtcaccagctgtctgtattagacaaggttgccaagtgcaaaattggttattacggagggagagatttgctccattcattgttttttggaaggacagggtatgctgtctagatccaggcaataggtttgcttttgtaccccagcctacccaagcagggactggacctccatccagatagagggtaggacaaaggagccggggataggagcatgtgttccttagggccacatatggctgtttcctgttgcatctggaaccaactatattgtcttcagtgaagactgattcaactttgcgtatagtggagccaaagagattttagctctgtatttgtggtatcggttttgaaaacaaaagaactgatcctttaatttgattattgtaaatatttgatcttcacttgagagtgtttgtttggcttgtgtttggtttttaatctttgggtttaaacgagatccaaagggagaaagagcagtatgcctcgtgccgaattc

SEQ ID NO: 655 - DNA, 2971 bp, Rattus rattus (black rat)
cggcggccgagtgcgaggcagagagcgagatctgtacggtgtgcgagcgagggcgatcacagcctgcgaacaagcaaagaaagagagcgagtgagcggcgaggcgcctgcgcgatgctcgggcccctgagcccgcggccctgagctagccgggacggacatgcgcgggagggcgccgcggggccccgctcccctgggggaatgaaagctactggttgacttaagagcacctggccttcacagattcgtggccatcccagggtgggcacaatgtcaacagcaggagttgctgctcaggatattcgagtcccattaaaaactggatttctccataatggccaggctttggggaatatgaagacctgctggggcagtcgcaatgagtttgaaaagaattttttaaatatcgatccaataaccatggcctacaatctgaactcccctgctccggagcatctaacaaccctcggatgtgcttctccgtccgctccagggagcggtcacttctttgcagagcgtggtccatctccaaagtcaagcttgccccctcttgttatcccaccaagtgaaagctcgggacagcgtgaagaggatcaagttctgtgtggttttaagaaactctcagtgaatggggtgtgcgcttccacacctccacttacacccattcaaagctgctcttccccgtttccctgtgcagctccctgtgatcgcagttcccgaccgctcccaccattgcccatctctgaggacccatctctggatgaggccgactgtgaggtggaatttctaaccagtgcagatacagacttccttttagaagactgcgtgccttccgatttcaaatacgatgttcctggcaggcgaagcttccgtgggtgcggacagatcaattatgcgtattttgacagcccaactgtttctgtggcagatcttagctgtgcatctgaccagaacagagttgttccagatccaaaccctcccccgcctcaaagccatcgcagattaaggaggtctcactcaggaccagccgggtcgtttaacaagccagccatccggatatctagctgcacacacagagcctctcctagctcggatgaagacaagcctgagatcccgccccgggttcctatacctcccaggccagccaagccagactacagaaggtggtcagcagaagtgacctctaacacatacagtgatgaagataggcctcccaaagtccccccgagagaacctttgtctcggagtaactcccgtaccccaagtcctaaaagccttccgtcttacctcaatggggtcatgcctccaacacagagctttgcccccgaccccaagtatgtcagcagcaaagccctgcagagacagagcagcgaagggtctgccaaggccccctgcatcctgcccatcattgagaatgggaagaaggtcagctccacgcattattacctactacctgagagaccgccataccttgacaaatatgagaagtattttagggaagcagaagaagcaaacccaagcacccagattcagccattacctgctgcctgtggtatggtctctgccacagacaagctggcctccagaatgaaaatggatgtgggcggccacgggaagcgcaaacacttatcctacgtggtttctccgtagatatggggtcatggttcaacagaagttacatggaacggatggctgccaagtttccaatttgaggttcatagaacagtgtcaagtggcaacatgaagtggtggactctgccttggtgaggaaggcatagagccgttatgaggtgctgttgtgctgggagtccctgacctatcagcataggaagaaaaaagtatgatttaaagatgtgctagagggacacttttacatttgactacattatatacctatgtataaacgtgcggtgtaaccatagaccatagctgcaggataaccaattagtcactctagagtaatctatattcagaacaattcaaacgagctggaggcacagctccagacagtgtgaaaattgagcaaacgggagagagcagtactgttgatcagttataaatgtagagattcctggcattcaggcctgctatctagtttgttttcttccccttccctgccagcagtcttctccatacacgacagggcgtgctcttcgccaggcctgtaacgtcttgttgaaatcgttctatggcctaatacttgccgctctgggcgtttgtcttgagaggagaggacagccgtttctggaccatgttatctatcacctgtgtatgtctctcttggaaatggacagaattggtgacttttccatgctattcctgcttttcccgtccactgaagaggctttcaagagtgcagttgagtggtgctggccgtcagtgttgggtataagttttatagaccagcccagtgattagccatgattgagagttatcgtggggtgtatgggatgttgttttgtttttgagactttaaagtacaacacaagctggtcttgtgttgttggttcctattcagtatttcctggggattgtttgctttttaagtgaaacacttctgaccaatagcacagaacgtcttaatgccagaggtcacttcagcatcttcctgcttagaaaactcacagctggctgcctcactgccctgagagtcagtgagacgcatagcttgtgttcaatttttacatcctctgattgtttatcttgtatagataagcacaaagagaaggtgcttgctaacagagggacaccgctgccatgtcccaacaagctgttcagtttaaactgctgaatgacattatttgagctatttaaagcttatttttagtatgaactaaatgaaggttaaaacatgctttagaaaatgcactgatctccgcactgtgtgtacagtattggacaaaggatttgttcattttgttgcattattttgaatattgtcttttcattttaataaagttatattacttatt

SEQ ID NO: 656 - DNA, 1508 bp, Rattus rattus (black rat)
cccaactgccagcagcctgcaccctgcacccgctcagctccgcacagccatgtttcagccagctgggcacggccaggactgggccatggagggcccgcgggacggcctcaagaaggagcggttggtggacgaccgccacgacagcggcttggactccatgaaggacgaggattacgagcagatggtgaaggagctgcgggagatccgcctgcagccgcaggaggcgcctctggctgccgagccctggaagcaacagctcacggaggacggagactcgttcctgcacttggcaatcatccatgaagagaagacactgaccatggaagtgattggtcaggtgaagggagacctggccttcctcaacttccagaacaacctgcagcagactccactccacttggctgtgatcaccaaccagccaggaattgctgaggcacttctgaaagctggctgtgatcctgagctccgagactttcgaggaaatacccctctccatcttgcctgtgagcagggctgcctggccagtgtagcagtcttgactcagacctgtacgccccagcatctccactccgtcctgcaggccaccaactacaacggccacacgtgtctacacttagcctctatccatggctacctgggcatcgtggagcacttggtgactttgggtgctgatgtcaacgctcaggagccctgtaatggccggacagccctccaccttgcagtggacctgcagaatcctgacctggtctcgctcctgttgaagtgtggggctgatgtcaacagagtaacctaccagggctactccccctaccagcttacgtggggccgcccaagtacccggatacagcagcagctgggccagctgaccctggaaaatcttcagacgctgcccgagagtgaggatgaggagagctatgacacggagtcagaattcacggaagatgagttgccctacgatgactgtgtgtttggaggccagcgtctgacgttataagaggaaagtggccaaaggaacgtggacttgtatatttgtacaaatagagttttatttttctaaaaaaaaaaaaaaaaaagaaaaagaaaaaaaataagaaaggatacttagcaccacagcacacagcgcctagccccgagcattctattgtggtgattcagctgttgttcttctcaaatttggggaaacagatcattgaaattcaaaggaaatgtctcctaaggttcatgtttgtgggattttttttttttttttgaggtgattttccagaatctgataaaaggaccacatttaatttatgtgcttttggttgaaccgccatagacgtagctgaccccagttgccctctacgtaagaaccaggtcgatagtggtatgtgcttaagcaccccagctgagatttgtaccactttcttgtaaatgttgtatatggatgtattttgttggtaattatttttggtacttctaagatgtatatttattaaacagatttttacagtatcaaaaaaaaaaaa

SEQ ID NO: 657 - DNA, 1758 bp, Rattus norvegicus (Norway rat)
gaatagcgtctcgggagtgtccctgggtaatcgctgcatctcgttttgtgtgtgtgctctgtcgaaacgtctgtgatgtgtgtatggttttcacgtgaacggaggcaggcagagttgggtctgtgggttctagtgtgttcttaatctttttggaagtttgtgcagtgacttcccctctgggattgtttcctatgcataccttcaagtatgtgtgaatgtgttttctgtggtcccttgatcttactgggcttctctaaggagggtggctggaccatctgctacgtgtctgggagcccctctctagctaccacatgtcccgacatgtgcttactcccaatatttgcacccactcgcattcacaactcccaggcaaaaagaaaaaatcaaaaaaacaaaaaaaacgtgcactggggcacctagaaaatgggcagccaaggctccgcctacattttgcttcctccttggaatttccagccctgtgcagccaactgctccctagctgcgaagggcggagtttcccggctctataagtagtggtgccttaccggggatccgcactcctccgtaccctctgtacagcgcgcgaattatgtgccattcgcgtaaccacctccacaccatgactggcctgagggctccggcgccagttccctccaccggcccggaactccggcggggctccggtcccggaattttcaccttcgaccccctcccggagcgggcggtagcgtccgccgtgcgtccgaacacttctcgcgggcacggaaaacgcagccgacgggtgctctaccctcgagtggtgagtatcgcccgagtgggcagcaagaggtcgagtcgccccggaacctttgggaacaactagatgcggggactttcgtctgacgtttccctcttttctctgctcaggtccggcgccagctaccaaccgaggaacccaacattgccaagaggatcctctttctcctgctcgccatcatcttctgccagattttgatggctgaagaaggtgtgtcgcaggccctggctccggaggatgctaccagcgccatatcacctgagcccatctctgcgcccattactgcgcctcctgtcctcgagcctttgaacctgacctcggagtcctcggactatgctctggatctcaaagcttttctccagcaacacccggcggcattctaaacgcgatgggtcacagtccggaaaaaaaaacccaaagagcaccaggggtacctggtcggcaagaacgtatcccaaactgggacttataaggcaacgctaactcagaacactaccgccaagatgccggttcttggggcgagcccgaggcaccgtgggtcctggctaggctcactggtgacggacggaggtcttctccgtgtctaattaatatttatgtatttatgtatatcctcctaggtgaaggaggggtgtatgtaatatttattctaacttatgcaggggtgcgagatatgcccccttgctgtgacacagatatttattacgatttatagggtccgtgagacagagttgtgggaggattagtttagtcttggtcggggggcataggtttaggggtaacactccattttccagcacttcgactctgttgtaagactttggcagacccttgggaatacggtctgtgtgcctttgatgtcttcctgactggaagtcttgggtccatggattgtcagagggcggctgtctggggtcgcctagtatgttctgtgaacacgaataaacttgatttgcctgtcg

SEQ ID NO: 658 - DNA, 528 bp, Rattus norvegicus (Norway rat)
gttcttaaactttgctctccaacctccaacatgaaggcgctgagcccggtgcgcggctgctacgaggcggtgtgctgcctgtcggaacgtagcctagccattgcgcgaggccggggtaagagcccgtcggcggaggagccgcttagcctcttggacgacatgaaccactgctactcgcgcctgcgggaactggtgccgggagtcccgcggggcactcagcttagccaggtggaaatcctgcagcgtgtcatagactacatcctcgaccttcaagtggttctggcagagcccgcgcctggacccccggatggtccgcatctcccgatccaggtacgagagggagctagaccaggctcatctgaacgtgcgggctgggatgctgcgggtcttccccaccgcgtcctcgagtaccttggctaactcgtctcttatccttctttcacagacagctgagctcactccggaacttgtgatctccaaggacaagaggagtttttgccactgacccggtcgtcctggcacctcccg

SEQ ID NO: 659 - DNA, 918 bp, Rattus norvegicus (Norway rat)
gcgatctgtgggtgacagtgtctgcgagagactttgccataccattttgcgggaatttggagagaaacaaccagctgcttccagtcccctccccctccgccaccatttcggacaccccgcacagactcgttttggggtaccctgtgacttccaggaagcacgcgaggtcctttggccccagctcgggcgaccacctgtcttggacgtgttgactcatctcccatgaccctgcggtgcctggagccctctgggaatggcgcggacaggacacggagccagtgggggacagcggggtcgccggaggatcagtccccggaggcggcgcgtctggcgaaggccctgcgtgagctcagtcaaacaggatggtactggggaagtatgactgttaatgaagccaaagagaaattaaaagaggcgccagaaggaactttcttgattagagatagctcccactcagactacctattaaccatatctgttaagacatcagccgggccgactaacctgcggattgagtaccaagacgggaaattcagattggattctatcatatgtgtcaagtccaagcttaagcagtttgacagcgtggttcatctgattgactactacgttcagatgtgcaaggacaaacggacaggccctgaagccccccggaatgggactgttcacctttacctgaccaaacctctgtatacatcagcaccgacgctgcagcacttctgccgactcagcattaacaagtgtaccggtaccatccggggactacctttaccaacaagactgaaagattacttggaagagtataaattccaggtataagtatttctctctctctctctctttttttttttttttaaatgaatgcctcatatagagtatcaccgaatgcagctatgtgaaagagaaccagaggccctc

SEQ ID NO: 660 - DNA, 1992 bp, Rattus norvegicus (Norway rat)
aaagtctccagggcacagagggagtcaactcattggcgcttgagtcggcaaagaaatcaagatggccaaagttcctgacttgtttgaagacctaaagaactgctatagtgaaaatgaagaatacagttctgccattgaccatctgtctctgaatcagaaatccttctatgatgcaagctatggctcacttcatgagaactgcacagataaatttgtatctctgagaacctctgaaacatcaaagatgtccaccttcaccttcaaggagagccgggtggtggtgtcagcaacatcaaacaaagggaagattctgaagaagagacggctaagtttcaatcagccctttactgaagatgacctggaggccatagcccatgatttagaagagaccatccaacccagatcagcacctcacagcttccagaataatttgagatacaaattgataaggatcgtcaagcaggagttcatcatgaatgattccctcaaccaaaatatatatgtggatatggacagaatacatctcaaagctgcttcgttaaatgacctgcagcttgaagtaaaatttgacatgtatgcctactcatcgggaggagacgactctaaatatcctgtgactctcaaagtctcaaatactcagctctttgtgagtgctcagggagaagacaagcctgtgttgctgaaggagattccggaaacaccaaaactcatcacaggtagtgagaccgacctcattttcttctgggaaaaaatcaactctaagaactacttcacatccgcagctttcccagagctgttaattgccacaaaagaacaaagtcaggtgcacctggcacggggactgccctccatgatagatttccagatatcataaaaacagccttatttaggagtctactttcttgagaagtgctgacaatctgtatgtaccatgtacaggaaatgttcctcgtcctaagtcactcgcatggcatgtgctgagtctttgtaattctaaatgaatgtttaccctctttgtaagagaagagcaaagcctagtggaaccagcccgacatatgatactgtttgttatttaaagagtaccctatagtttgctcactactaatcattttaattattattcttcatggtattcttaggagggtcaaaaagactctgctcatattacagatgggctaactaagggataagacaactgaaaagtacactcaattgcatctggaatgggaattcacagacccatgaaacttatctcactgtgcaccttctgcttctaaagtgccggatgggtaggataaagttgtaagaacgtaatgctatcattttcaaaaggaaggggacaatagctacatctttcctacctcagtgggttttattccagtaagagcatttggataaaatccttctgtaacagacctcaagaaggagacagactgttgaatgttatttttaagttattttatatatgtatttataaatatatttatgataattatattatttatggcacatccttaaatcctctgagcttgccaggcatcctcagcagcagaattttctaggtggtcagttagatgcagtgtcctctgaaacaccatgctatagacagacgtacactgtttccacatccgtggagctctctttacattcttgtccttaggagccctgcagtcatgatcaccaatctgtactgttcacttcgttcatttaaaatgataactgggtcagtcttttgccctcctgtccttaaagctgtctgggtcttcttacatcattcaactcacctgtaattaaagctaaccatctaaagacgggaagaacctaactgtgacaaccacatccctgttacctgaagtttcttttctaggatgtaatcagtgtttcctctgggttccaaatttgttctcaaaccagggtgtcacaaaaatatcaacaataataatcaactcatcattactattgatcataattaaataaagcaagtttgagctg

SEQ ID NO: 661 - DNA, 237 bp, Rattus norvegicus (Norway rat)
atctgctgctgccctggccaccctgaggggtcaccagcacccctgagtaggctgggtgggcgtccgcctgacagtggcccaccctcctttatccatgtttataatatgcactttttcattgtaaataaaaattaatatatatatgtttataaagcaaagatcttttgagctttgttattgacatggggtctatgtgcagcccaggctggcttcaaactggagatccaagcttgggtg

SEQ ID NO: 662 - DNA, 2639 bp, Rattus norvegicus (Norway rat)
gaatgctggcagtgtgggtgctatgtaaaagtatttacatagctttgtagagtgagccaagcccagtctgtttgggatgactcttcacagtgcctcgaatctgtcacacgtcttagtaagcagagtcacagagtttctgtcacatcatcctcctgcctacagggaagtaggccatgtccctgccccctactctgagcccagctgtgggagccagccctgcccaatgggctctctctgattgacttctcactcacttctaaactccagtgagcaacttctctcggctcgttcaattggcgtgaaggtctgtgtcttgcagagaaggttcttcacaactgggataaaggtctcgctgctcaagtgtagcccagtagaactgccaagccccttcccctcctctccctagactcttggatgcaagaagaatccaggcagctccaagggtgattgtgtccaacctagaatgtcttgaaaaagacattaaggggactagagaagacaggggatccaacggttctctgcagcccagcctgactgacatgtaactcttctggttctcaccagccagctggacctgcttagtattctttctgcctcagtttcccagcctgtacccagggctgtcatagttccatttcaggcagtagtaatgaatgagctgacataaaacatttagagcaggggtcagtatgtatatagagtgattattctatatcaggcattgcctcctcggaatgaagcttacaatcacccctccctctgcagttcatcttggggtggccagaggatccagcagacacctagtggggtaacacaccccagccaactcggctgttgcagactttgtctagaagtttcacgtctcagagctgaattcccttctcatgacctttggccgtgggagtgacacctcacagctgtggtgttttgacaaccagcagccactggcacacaaaatgtgcagccagcagcatatgaagtccaagaggcgtcccggccagccctgtccttgacccccacctgacaattaaggcaagagcctatagtttgcatcagcaacagtcacggtcaaagtttagtcaatcaaacgttgtgtaaggactcaactatggctgacacgggggcctgaggcctcccaacattcattaacaacagcaagttcaatcattatctccccaaagtttattgtgttaggtcagttccaaaccgtgctgaccatggctatgatccaaaggccggccccttacgtcagaggcgagcctccaggtccagctgaggggcagggctgtcctcccttctgtatactatttaaagcgaggagggctagctaccaagcacggttggccttccctctgggaacacacccttggccaacaggggaaatccggcgagacgctctgagatctctgatccagaccttccaaaaggaggaagaaaggtaggcagggccattccactctcctctccaaaagtaccactgaggggtccactcacagtctttgccctgacaaccaaggccctctagccatgtgcaactcatgcaaagtctacagaaggaacgggaagggcccatgggtgccggtgttcaagagcctctctttttgtttcaggtggcaccagagtccctgcctctctccacaccattgcaagaatgcctcctcagctgcataatggtctggacttctctgccaaggtcatccagggcagcctcgacagcctgccccaggaagtgaggaagtttgtggaaggcaatgcccagctgtgccagccagagtatattcacatctgcgacggctccgaggaggagtacgggcggctgctggcccacatgcaggaggagggtgtcatccgcaagctgaagaaatatgacaactggtgagtcccttcagcccaaagtctctgcctacaggctccccagctctaccttctcggagtctggagaataaagacccttgcagtagcaaacgcctgagaagcttaggagatcagtcagaatccagacaccctgtgaggttagcatagccagcttctagattccagatagccatgcaaggcggcccctttccctagggccagctcatggcttagcaaatgtctacctggtcaagttcccgttggcttggcttccatacctaagtaacacggtcaacgtccttgtgtctgcaaggccgggaagagcctgaggtaggcaagagaggtacatccccaagggtaccttgctgaaggcatccctgtgactttttcagttggctggctctcactgaccccagggatgtggccaggatcgaaagcaagacggtcatcattacccaagagcagagagacaccgtgcccatccccaaaagtgggcagagccagctgggccgctggatgtcagaagaggacttcgagaaagcattcaacgccaggttcccggggtgcatgaaaggtgggtgaggccagaccccaggcctgacagtgtgctgtgtgcacgttcacgctcccggtagtagcttaagctgcaaagggtggcccgcgtgcgaagctccgcgtctggttctgtctcacggaatatcaaattgttctctgagagtacgggtggctccgacctgtcatctcagacatggaagctgaggcaggggcattcaaagtttaaggcc

SEQ ID NO: 663 - DNA, 2410 bp, Rattus norvegicus (Norway rat)
tacgctgctttggtggcgtgcacctctcacggtgtgcctagccgccgatgcccaggctgcacgatcacgtctggagctacccaagcgcgggcgctgcgaggccgtacagcctcccgcgaggcatgattgcggcggccctctgtccgcagggccccggagcccccgagcccgagcccgcgccccggggccagcgagagggaaccgcaggcttcagcgcacgacccggcagctggcaccacgacctggtgcagcggagcctcgtgctcttctcatttggcgtggtcctggctctggtgctcaacctgctgcagatccagcggaatgtcacgctcttcccggacgaggtgatagccaccatcttctcctccgcctggtgggtgcccccgtgctgtggcacggcagccgctgttgtcggcttattgtatccctgtattgacagtcacctgggagaaccacacaagttcaagagagagtgggccagtgtcatgcgatgtatcgcggtgtttgttggcatcaaccatgccagtgccaaattagatttcgccaataatgtgcagctgtccctgactctggcagccctatccttgggcttgtggtggacgtttgatcgatcccgaagtggcctggggctcgggatcaccatcgccttcctagccacgctgatcactcagtttcttgtttataatggcgtctaccagtacacgtccccagatttcctctatatccgttcttggctcccttgtatatttttctcaggaggtgtcacagtgggaaacataggacgacagttagctatgggtgttccagaaaagcctcacagtgactgagtttgagcacatgattcagggcggaagcagaatgtggagacactggtcctgggtgtggtgaagaggatctttttctcaatgttccatttagactgggctgatgataaatgactcctaaagatgcgttcacgtagtctaaatagcaagtggaggcaaggactacttacctaaagtcttaccttgctcacccaccctcacacctgtctgcactggaacattctatcccaggctgtatgtgagagttgggtaagggggccggtttcccgagtattagatttcactcatcattcaaagcaaaatgccatatttcaaagccttgaatcaaaatgaattaccaactagcagttttatatcagtgcccaaaggagagaggttgatggtgcttaacagagatgaagtatgtgcagtaagaatatttatccagaattaaaatatagggttgtgtaaagaggggctaagggcagcagtaagttggaggaagatcatgctccccggaggacccagtgcagccacatctccaggtctcgctcaggctggcgctcacacgtgggtctcatcagtgtgggaactatgctgtttactgacaggaggcttgtagacaatcttactgacagcccaggacaacacaaagtcaggattctgcattgcgatgctggacttttcatctcaatttaagtgaagttttatccaagatctggagcatctaagagtgaatagctgtctgctgtttcagtcgtaatgagccgaaattgtgtctctgtcactccagagtggagaggacttttccacagccctatggagcttgcaatctgtgattgccttgtaaaaggttgagtgtgcacgtcactgcgttcggtgcgcagtgtcctgtgtgtgttggacagcgtagaacacatgggaccttgcaagtattgggtcttcaacttcaagtgcaatgtgtatgaaaccaatctgagccttgtattctcttaaatatttattatttttttttaaccgcgcgagctgttctggagaagggttctcgggtcatttcagagctgtgtgaggcacactcagcaatactgtgtcagccgtgacgctccccagtcacaccctccactacaccctagtcctttgacatactccaggtttgtaagtttagtgatttttacttacaaatttacccttttttgcattctaaaattgtgtttaaattatatggaagtacttggtgtaggcagtcattggtccccgggcagcagaagctctgcctgtggaatcgggtttgggttcactctgcagggctcctcatagaggctttgcttatttgttttgaggaaaatgtctggagtaaacctttgttttctgaaactactttagctaaaagaaaatgggtgttctagactttggaatggttcttaaagtttcctggaaataaaaataatgattggcacttcaaagacattctttagccaagacttcagtgtctagcagaaaccacaagtgactagaagagcaagtgatcttggtgatgcacttgattgtatacaatgagtattttttctcttaaactggaaataaatctgttagaaataatatagcca

SEQ ID NO: 664 - DNA, 418 bp, Rattus norvegicus (rat)
tgacatactccaggtttgtaagtttagtgatttttacttacaaatttacccttttttgcattctaaaattgtgtttaaattatatggaagtacttggtgtaggcagtcattggtccccgggcagcagaagctctgcctgtggaatcgggtttgggttcactctgcagggctcctcatagaggctttgcttatttgttttgaggaaaatgtctggagtaaacctttgttttctgaaactactttagctaaaagaaaatgggtgttctagactttggaatggttcttaaagtttcctggaaataaaaataatgattggcacttcaaagacattctttagccaagacttcagtgtctagcagaaaccacaagtgactagaagagcaagtgatcttggtgatgcacttgattgtatacaatg

SEQ ID NO: 665 - DNA, 8351 bp, Rattus norvegicus (Norway rat)
gaattccatcagaatttgcctttctggtggcttctctttccctgcccttgtggtgtttttccttcagtgagtgacaaatttcacaaccctggctgggactcccgaggtgctaagattacaggcctgggtcacaccacccaaacctgactttctttttcattgttgcttgtatttttctgtttgtaaccaaagctggacgactggaactcactgtgtagactaggctggccttgaactcatagaactctacttgcctctgcctcctgagtgctctgattaacggcactgaccaatacatccaacctacctactttcattttctaaatctaagtcctaacaggaagtgggaactgggcaggaataacagtacggtgggttaactccatgagtttaccggactttgcgagcctcgactgccaacgacatcctggcttgaggctggaagtcacagcccaacaggggcaaagattgctctgtgaccagtctggaaagggagcactggagcacagaaatcaatccggttcaagttcatacccagggcaaccacggaaagtgccaggaaaggaaagaacaggatgttttccacacattccatgggcagccatggggatccaggagaaagtgatgcttggctgagccaagaagcagtgccccagtttacagtaagggctgagaggacagcctgtcctgagcttccggtaacacatttcctgccttctcaaatgacagacattccatctacgactttgagtctgatttcagcagtcttatgcaagaggggaaacaccatatgcctccagggaaagaaaatttggctgccgtctccaccctttccctcagcatccaccgtgggtgggggtggggagggttagtggggctttccatccctgtctttcagaacactacgatctggccctttctgcttggccaacacctgcgcagagtcctagttcatatcctcccagaatggcctgctctccacctccagcagagacccccatcattttttcctgttcactctctgccccccaccccccaccaagaataagtatccttagcacaaggcttgtgtctttatggtctctagtctctgacaactggctggagtctcagtggattcgaaccctccattcatcttgggctaatgactatgtgattgcgcctccgtttccacttttctactgtgaaaataatgaacaccccaagctatgttgtaaggaaaaatgagagccctaacagtgcccccagcacgtgacacgcagggggtacgtgacacgcagggggtacgtaaccaaggccggtaaagtctgggctagggctggtttttgttacctgttcacactgtcagctaggttttcctgtatgcggggtctccaagccccgctttcacctaagttagcactcaagacgtgctgtggggactgtgtccccgtggacgctgcagggggttcgatgtcccgcaactcctctgcacccggccacttgggcccagggcacgtgagcaggtttcctggaaccggtccccaccggatcgcagaccctttgcgctcagccctttgctctcagtccctgcgccaggagaaagggggtgtgactcagcgcgggggcgtgtgcaggctctgtacccacgtgcaaaaggagggatgcttgcagacttcgggtcgtgcgcaggctcccgggcgtgtgcgggccatttcccttgagccagaagaagggcgtgtgcaggcagtggggaggagggcaggtggcgccccgccacccgggcggagcttttgcgcgcgacccaatactctgggctataaaggtcgcgctccgcgtgcttctctccatcacgctcctagaactctacagcgatctctcgttgatctccaactgccgcctccattcgccatggaccccaactgctcctgtgccacaggtaaggggggctgctgacgggcctctgtaaccggagcttctgggagagcaggacggacttttgggcccctactctggtaactacttttagggtactactggctgctgccttccgaacgaattctggaacactcccgccccttttaaactagtccttgagataatggctcgcccaagctggctggcttgcacccgagttctttggagaactgtgttcagttatgcccgggtccgctcaccgcgctccctgccttcttcctctagatggatcctgctcctgcgctggctcctgcaaatgcaaacaatgcaaatgcacctcctgcaagaaaagtgagttggatttattttctctaccctttcccttcgcgcccctgcggtccctagcccgccgcaccttcccagagcgtccaggctgcctctaactcggtttctcgctcacgctcaacttttttcccccaggctgctgttcctgctgccccgtgggctgtgcgaagtgctcccagggctgcatctgcaaagaggcttcggacaagtgcagctgctgcgcctgaagtgggggcgtcctcacaatggtgtaaataaaacaacgtaaggaacctagcctttttttgtacaaccctgaccggttctccacacttttttctataaagcatgtaactgacaataaaataaaaaaacttgacttgattaacccagctttgtctgtgttcattggaaataaggggctggcagaggcgttgaaatgggattggtgcaccttgatttgggataagtggattgatgacccctctggactttgatagtctcgaacatggtgggcagaaacatgtactggtcacaaatgtgggcatgtgtatattggggattaaacccaaagcttcctgcttataaaccagggtgctctaatgagccacactcctacccctagatgcataatgattctggtttaattttggattattaggcttaaagcagtatgaagtacctgttcataagctttggtaaataaaataaaagttggagtgagtctcatacgactcctctttgtagtcccaatatttgggagcctgaggcagaaggatcggtgcaactccgaagccaacttggtctcaaattctgttaacctttgattttgagaccatcttactgtgtaacctaaaatggtccttgaacttgcagtcctgcctcagacttctaggtactgggattacaggctcagcttaaaatcagggctggagagatggctcagcggttaagagcacccgactgctcttccagaggtcatgagttcaattcccagcaaccacatggtgctcacaccatctgtaatgagatcttacgcgttctggcgtaatgcaagcagaaaagacatcagtaacgtgaacaaaaccatgaaaagtactgtaaacactataaatatccaagggtgtgccttgcagtttggagactaaatggcacatgtccaacctagagctcccatgaggaactgcccatctctggtatacagggacacggacaggattttttttttcctcttccagagagccctgtgataggacttggctgtcagtctggaagttcttctcaaggtcaggcagaaatctacctacccctcactccataccaacccctggcaatttaagcaaagtaactagaaatttggaaggaattgactagcatcttcccaggagctaggcatccaggttgagtctgcaatttggagggcggggtggagtttcctactctataggaaggaggtgaatacatgcaattaaaaccagccgttaatgccccctggctatttgttgaggtaatgcgatttggtcttcaatcaaagggaaagtttcttggctagaagtaaggaccaagcttgccgtaggctttctctgtgaagagtaaatttacaagacagcctctgtttcttgctgtcaggaagtcctagttcacagcccactttctctcttattggtcatgtagcctgggcaagtcactgaacccctcaaatgctgatatcctgccctcctagatgctgataaccacctgtccccaaagaacacacgggcaaccaagcacagatctgatttttaaggaatttgttttgtaagtgcagtttgggaatctggcctcatttgtctcttgtgtgcccttgctgacaccattcattcagccctggccttgatttaggtgacaccgaactcgggctgtaccctcagagatttccctctttgtctacaaacaaacaaacaaagcaaatatcctaattaagactcttgtgtgtcaagtagggcatctaggaatgagtgctgggaccactcttagtcccagaatgccttgaaaccaagtgaatgacaattatacatttagcttctcaattaaaatggaagacattgggccgggaattggctcacagtggagagcctaccaggcttttgtgaagctctgaggttcatccctagaaccattaaaaaaaggtccgtgggcctgggaatgtagctccctggtacagtgcttacctaacatgcacggacccctgggtttgctccacagcatggagtaagcagtctgatggcacacacctgtaattctaacacgcaggaggcagaggcaaggaggatcaaacgttcaaggaccacggcaagtttgaggtgtgggccacatgtaaagccgtctccaaaaagacatcacacacaaaacacaacagtattgtgatacacacgtatacctgtatcctagcaacctgggaaactgaagcaggagactgtcttgagttcaaggccagactgggctgttcggtgatcgacaggccattctgagttacagagtgaggcccttggaaaaggagaggaaggagaggaggagagactgggcctggcaacatgcatctatcatcttagctactcaggagactgaggcagggggaggatttccagctcaaagtctagctacagagcacgtctaaagccagcctggacagcttagtgagaccctgtttcaaaataaaaagaatctaaaagactggaggtaaagctccagtgtagaatgcttgcctggtaaccaggaagccttgggttcaatccttactgtaaaaaaaggaaaaaaaatcatattatgcaagaggtctaaaggcccaagaatctgttacagatctcagttttggtaatagacaataaaatataacaagttggtaaaaacaagcaagagtaccaactacaaacatacttcatgtggttcagcagaagcatctcagtatgcatccagaaaacagcagacagacagaattgggcatccttgggctagggcacacctcagcctgacttctacccgagaagccagcagtcttagccagtgcagaaccactggtgtctctgacttgggatctctgcttaggatgcgcccttgagtgcttagaatttgtctctagtcaggctgaatcctctctctttccaaacccagtccttagctatttaaaaccagtaaactcatgagatttggagtcatccaacgttatccaggcaaggattctgtttttttcttaatttttatatttaattgcttattaatttttgaaataggatctcatttgtgtggccctggctggccttgaactcaagaagaccatctgcctctgacttctaatagctgagattaaagaggtagcctcaggcaagaacttaactatagaccaagactcagttccacgtgaagttttttggatcttcccacacagagggtataactgtgtcatctccaagatgaggtatcccgaggaaggagaaatggcctgggtcattgtcaccaaaccagtgggtaataggttaatggaaagacacatgtgtctaaaccaccaaggaggaggaggaagagggcaaagaggggaaagaaggaggagggggaggagtgtcatagcccaggactaggtgccttctttgcctacacacggacctacgtacagaaggacagcatcagagaacttgggacccgtacaggaacattggtgtcaagctgtactgcttcacagcccgttttactactgactggttgtatggcccacccggcaggtcattgaatcctctgtccttgtgtgtaaatagaatttgcatctctatataggtattaggtgagagatcggtttgactcctggttctggcataatcatcatatcgcacagtggctggtggaggtcctataacagttaagcaaaacctgcccaaggtctcatagctctgagtacgcgtgaaccaatggcatagctgatctcttgccctagtctcaagggctgacagaatctaacgttactctaaagtcagaaacattgaaaatataaacagctgcccgtattggttttggtttttgttttttgttttttttttttgtttatttgttttgttttgttttatctaatgcagtccctggatatcacctaaaatgatccctctgcctcggtttttttttttttttttttttttttttttttttttggttctttttttcggagctggggaccgaacccagggccttgcgcttcctaggtaagcgctctaccactgagctaaatcctctgcctcggtttttaaaaccggcctggagtagagccgatggctaaaggtttgtgacccccagcccggaacgtgcctacatatgcccgctcatgagtggggaatatgttgcgatgagtgtccgttggctctgttgctgtgtccagaaggaaggggctcaaccaaagaccatgatgggacagagacagacaataaggacccggaaagttcgtaatcaaggctagtctttataaaactgtctccttcgcctctgctagcttcgattcagagagacgtgggcggagccggtcgctgcccaggaactccaggaaaggagaagctgaggatagcgcgctacgattgtgtttacagagacagttgggcttcctgaggtgtgttctcgtaatgcactggatcagtgatggcctgtaatatcccggaaagcactacagaaacatgatgttccacacgtcacacgggtcctcctacccgggccctcctactcgggcctgtggcaccaaagggggcggtcccgttgtgcacaccggcgcccgagggagctctgcactccgcccgaagagtgcgctcggctctgccaaggacgctgcgctcgtgactgagcgcgggctggagcaaccgccaactgagtgcaaaccctttgcgcccggacccgtccaacgactataaagagagcagactgtccgctaagcctcatcccgacttcagcagcctgactgccttcttgtcgcttacaccgttgctccagattcaccagatctcggaatggaccccaactgctcctgctccaccggtaagacgcccggtccttggtctttagaatacccagttgtaggggtttggcgggaataggcacctttagttgacaattcgtcctagttctttctagaacccgctcttggaatcgccttcacctgttcttggagtattattattgtccgaacggctccttgtcggggtttggggtaggatttagacgcgcaaataaatgtcccgatcacccacgtagtgggacatctgagttgagacccagttgttactaaccttattgtgaattgcctgatctacaagagaggtgagagaccgttgtgtcttgagatcaaagacccaagccttaccctaccctgtgaggagagaagaggggctaggctccctggagttctgaatagcactttgaattgagcagggcacatggtgttggccactgctgtaatcctgcctcttactgaccgctgtcttccttctcctccacaggcggctcctgcacctgctccagctcctgcggctgcaagaactgcaaatgcacctcctgcaagaagagtgagttgggaccctcgggtggtggtgggggaactcctacagagctggctctgagaaacgtctgaggccattcggtttggggcaagaagcaggtcttctgccagacctgtgcgaccggaggactaggaagcctactctgacatcttcctctatctttctttccaggctgctgctcctgctgccccgtgggctgctccaaatgtgcccagggctgtgtctgcaaaggtgcctcggacaagtgcacgtgctgtgcctgaagtgacgaacagtgctgctgccctcaggtgtaaataatttccggaccaactcagagtcttgccgtacacctccacccagtttactaaaccccgttttctaccgagcatgtgaataataaaagcctgtttattctaactctggttttcttggtgtcgtttagaaataagaaactggggcgacacgggttaacttgatagtctggggatctggttttggactcgcccgtgccttttaactcccgcctctggctcccaaagaggggtaataatgtctttgggtaaagccaagttatcccataagctt

SEQ ID NO: 666 - DNA, 91 bp, Rattus norvegicus (rat)
ggtgtctcagggtcttctgtgacctcaccgaactgtccgactgcaccgtttccaacttgtgtctcactaatgggtctgcattagttgcaac

SEQ ID NO: 667 - DNA, 2130 bp, Rattus norvegicus (Norway rat)
ttttctccgagttttctgaactctggctcatgatcgggcttactggatacgagaatcctggaggaccgtaccctgatttccatctacctctgactttgagcctttctaacccggggctcacgctgccaacacccgggccacctggtccgatcgtcttacttcattcaccagcgttgccaattgctgccctgtccccagccccaatgggggagtgagagaggccactgccggccggacatgggtctccccatcgtgcctggcctgctgctgtcactggtgctcctggctctgctgatggggatacacccatcaggggtcaccggactggttccttctcttggtgaccgggagaagagggataatttgtgtccccagggaaagtatgcccatccaaagaataattccatctgctgcaccaagtgccacaaaggaacctacttggtgagtgactgtccaagcccagggcaggaaacagtctgcgaggtgtgtgataaaggcacctttacagcttcgcagaaccacgtcagacagtgtctcagttgcaagacatgtcggaaagaaatgttccaggtggagatttctccttgcaaagctgacatggacaccgtgtgtggctgcaagaagaaccaattccagcgctacctgagtgagacgcatttccagtgtgtggactgcagcccctgcttcaatggcaccgtgacaatcccctgtaaggagaaacagaacaccgtgtgtaactgccacgcaggattctttctaagcggaaatgagtgcaccccttgcagccactgcaagaaaaatcaggaatgtatgaagctgtgcctacctccagttgcaaatgtcacaaacccccaggactcaggtactgccgtgctgttgcctctggttatcttcctaggtctttgccttttattctttatctgcatcagtctactgtgccgatatccccagtggaggcccagggtctactccatcatttgtagggattcagctcctgtcaaagaggtggagggtgaaggaattgttactaagcccctaactccagcctctatcccagccttcagccccaaccccggcttcaaccccactctgggcttcagcaccaccccacgcttcagtcatcctgtctccagtacccccatcagccccgtcttcggtcctagtaactggcacaacttcgtgccacctgtaagagaggtggtcccaacccagggtgctgaccctctcctctacggatccctcaaccctgtgccaatccccgcccctgttcggaaatgggaagacgtcgtcgcggcccagccacaacggcttgacactgcagaccctgcgatgctgtatgctgtggtggatggcgtgcctccgacacgctggaaggagttcatgcggctcctggggctgagcgagcacgagatcgagcggctggagctgcagaacgggcgttgcctccgcgaggctcattacagcatgctggaagcctggcggcgccgcacaccgcgacacgaggccacgctggacgtagtgggccgcgtgctttgcgacatgaacctgcgtggctgcctggagaacatccgcgagactctagaaagccctgcccactcgtccacgacccacctcccgcgataaggccacacccccacctcaggaacgggactcgaaggaccatcctgctagatgccctgcttccctgtgaacctcctctttggtcctctagggggcaggctcgatctggcaggctcgatctggcagccacttccttggtgctaccgacttggtgtacatagcttttcccagctgccgaggacagcctgtgccagccacttgtgcatggcagggaagtgtgccatctgctcccagacagctgagggtgccaaaagccaggagaggtgattgtggagaaaaagcacaatctatctgatacccacttgggatgcaaggacccaaacaaagcttctcagggcctcctcagttgatttctgggcccttttcacagtagataaaacagtctttgtattgattatatcacactaatggatgaacggttgaactccctaaggtaggggcaagcacagaacagtggggtctccagctggagcccccgactcttgtaaatacactaaaaatctaaaagtg

SEQ ID NO: 668 - DNA, 325 bp, Rattus sp.
aaataaatcatttttttaattttggaaaaaaagaatcaaaaggcagggagaggggggactaggaagagctgagtaggtaaacaccttgcttctatctcaaggacagactttggtctccagaaccctgggttcccttgtagtcctagcactgggtaggcagagacacttgggtccctggggctctctagccagtctagccgtatgtatgtatgtatgtatgtatgtatgtatgtatgtatgtatgtgtgtatgtggtttcttagtataggatctgtggggattggaggacaaggggccatggaaaatgccatatggtgaagcaagg

SEQ ID NO: 669 - DNA, 506 bp, Rattus sp.
cacactcaagattttatttaaaaattccaaaaaaacccacaaaaatagacttgtacggtaacaatatattacttaatatattatagtatatacttaatacagtatcagttttaacattacaaaaagaaaaacggagtagacgacccaatatatataaatactataaaatcttattacaataaataaagtcgtcataaataaagggtccattggttggggcaggggcgtgggggaaaagggatttggcaatggctttggctatttgctttgggagggaaatttgagcaccaggattctcaggagaggctacaaccaccggacactgaacttcggggtctagtaaaaattaggatactattgtgggagccgggtcttcacagcacttaacattccaggagaccagagtttccgaggggctggtgcatacctgtaaccccagaacttggaaaaggctaaggcaggattatattgagttcaaagccagcctggggtaccctagtaatccc

SEQ ID NO: 670 - DNA, 462 bp, Rattus norvegicus (Norway rat)
tttttttttttttttttaaaaatagtttatttatttttaaaaccattaaggcaaaactgtaccctgaaattaactctttacattcctcagcttacagtaggatgttccaaacatacaggttcccataaattcaggatataaatcaatgcatacagtcagttcggtctcctacggagaaaacgaagactcgattttttttttttaaattaagattaagttatagccattttctaattgcccggaaccaatcagctcatgtgactagaaaattctatttgcccttctgtgttcaccctgattcctgatgtcctggcgagccctgtatccacaacaagctgggggttggggtgtgtgtgtgaggatgctggtaccggctcgacaagtcttattcaggcctgttagtatcacaggggtgaagggctgcaagctcccaggtctgataggatggcaccaaggacatta

SEQ ID NO: 671 - DNA, 626 bp, Rattus sp.
caaagtagaaatttaattcaattaaagatcaaacaaagcaggtgtttgtattggtctaaatatttgatccactctaatgaatattattcttctcaccgctaggcatttatttttagatatccacaaacttcattgttaatttccctgtgaataaaaagataacagagaaccaatgtttagctcccgccctcaacccaaagtggctcactgtatgggtcagagggtgcgtctcctctttgtcaggggtcacgagcatcaaggcagaagacatggcttgtggtatacgttggtctgctgccccgtggtctcccaaatgaaggacaattttcgcagagtcatcgagaaggtaaatgcattgggtttctgaagaaacacaaaactttcttcaggttaaacactccattgttttgatgactcttctgaatctgtttccaccaggaagctgtctagataacatccagtacgtttactacttaactcttctaccagtatattaacatgaggctatgtgattcaaagtaatatctaagggattctggaaaatgttaggtttcaaaccagtcaactacagaactacttactaaatactatgttacaataagatttattgacctaaacattattac

SEQ ID NO: 672 - DNA, 567 bp, Rattus sp.
cacatcgaattccattttaaaaacaaaaataattttaattaaaacaatttcttggcattgttcaaaaacataagactctttttacaaaagaaaacttcccatcttggttttaaaaaaggcaaacgaggaagtaagctgcattagacataagaggatggacagcctctgcagccacaggagaaatgtgtttgctttcttattacagttagctccttctgtgggagcctggagtcttgcatttgttttatgcatattgggccttgttgtattacttggcaggagcctgtactcccttgagtcagccgtgctcattggtcagaacacattccagcatctgacatcaatcccattaatcacgggcgggcgtgagtgagatgactcaacagtgagcagtgccggctatgcatggtattcagtgatgagaggtcggagatcctctgaattcagcatacgtgagatgccaaggacaaagtcctctcacatcaaataggtagtgcatgatcactaatactcttaatgcttcaaccttgaagggatttaaatgaatttccacataaagccatcttc

SEQ ID NO: 673 - DNA, 447 bp, Rattus sp.
ttgtattcataaagtgctctaaacaagatgttctttttagcagttggggaaaaaggttctctaaaaggcatttaattcttagtggaaaaataatattaacaaaagccttgtgcgaatgtttgaatgacaatttgctcattttcttcatgaattggggtttgatagaaaatgcatatgtgtcactgaaagacagagtgatgggtctgtgtggttggaactcaaaatgacattgctctgtcagtgtgtgctgtgccggcttgatggctttgatgggggaggggtacacttggctggtggtacttccaaaggtgaatcttgctatgtagggttagtggtcagggcagccattcaggctgacagaaccttggacttctgtggcttctgtgatggggacagggacatggttgacttgaatattcttcagacagccaaaaaatgagttccaca

SEQ ID NO: 674 - DNA, 405 bp, Rattus sp.
ggcttttattattcacatgctcggtagaaaacggggtttagtaaactgggtggaggtgtacggcaagactctgagttggtccggaaattatttacacctgagggcagcagcactgttcgtcacttcaggcacagcacgtgcacttgtccgaggcacctttgcaaacacagccctgggcacatttggagcagcccacggggcagcaggagcagcagctcttcttgcaggaggtgcatttgcagtttttgcagccgcaggagctggaccaggtgcaggagccgccggtggagcaggaccagttggggtccattccgagatctggtgaatctggagcaacggggtaagctacaagaaggcagtccctcgtgccgaattcttggcctctagggccaaattccctatagg

SEQ ID NO: 675 - DNA, 370 bp, Rattus sp.
caagtcaagtttttttattttattgtcagttacatgctttatagaaaaaagtgtggagaaccggtcagggttgtacaaaaaaaggctaggttcctacgttgttttatttacaccattgtgaggacgcccccacttcaggcgcagcagctgcacttgtccgaagcctctttgcagatgcagccctgggagcacttcgcacagcccacggggcagcaggaacagcagcttttcttgcaggaggtgcatttgcattgtttgcatttgcaggagccagcgcaggagcaggatccatctgtggcacaggagcagttggggtccatggcgaatggaggcggcagttggagatcaacgagagatcgctcctcgtgcc

SEQ ID NO: 676 - DNA, 608 bp, Rattus sp.
  misc_feature (596)..(596): n
cggccaacttgatgttctagtgctgaagggagcaagggccaggcatgtggtggagatgatgctgaaatggtttatccaataccatgcaaatcaagtcctttggatagaggtgaagaacttggacatggctgtttcaggcagctgaagtcaaaaggaccgggactggggagggcagggacgctaagtgaaagggctggtggccaacgggccttctactgactagaaggacttggctctgagatcttccatctgacctaagaggcagcccctcttgcgggccatctcttccctcctgtcctttattgtctctcgcactcccctccctttgctctctttcattccctttagcaaatttcaattgtcctaggagaaaaggttgctgtcatgtctgaaagacccgttgaggtgctgaaggagttgctgacccctgcagactggaaggtgctgacctgggcagggaaagcaggtgggacggaggcataggtggtggccaccgagggcgatgggaagccactgtgcgcaggagacgggtaggtagaggagcccggagaggagtaagaggtgggcactggggatggaaatgaggtggtggcggnggatgggttaga

SEQ ID NO: 677 - DNA, 463 bp, Rattus norvegicus (Norway rat)
ttgagaaagaacttaaagttgggagggtagagcagtagaggatctggatatacttggggggagggagggaagtgcatgagcaaagcataaatttaaaagttgcttttaaataataagaaattttatatagaaagaatacttacttatcaatgcacactttaattttaagctgataattcaactcaggaaatttgaccagcaacctattaaaaacatatagacaaagaaagttagtaggcttcgtaccatgatctcttgtttaaaaaaaatgtaaaacccctaatacttcaggtcctaagaagtaaatacattgctgagcatggcggtgcacacctttaatcccagaactggggaggcagaggcagatggctctctgagttcaagcaagcctggtctacagagtcccaggctagccagggctacaaagagtcctgtctagatgaaaagaaaaaaaaatatttac

SEQ ID NO: 678 - DNA, 294 bp, Rattus sp.
aaatggcaagtgtagaaatttatttgaaccaacattcccaccacaatgaaatgactcaacactgatccaggcgcccacggctgagggttagggagtattgcactttgcatttctttaggactccatacacggcaaaaagtttcaaaaacgttttgcttgttttgttttacacactctcccaactcatgcacacactcattccaaaccaacgtttggttatcccaaaaatggggaagaactccaaaaaaaaaaaaaaaaaaacccatagccttaaattgcactaaagttctgtaa

SEQ ID NO: 679 - DNA, 2130 bp, Rattus norvegicus (Norway rat)
gagacctcttcctccaacctgcacaacttcccgcttttcacctgggaccggcggagtgacctgcggacttaggcgcgggcaattctgggctgggcgccccgctgaggggccgcccatcggggcgaagggacttgtccctttgcccctctagccgacttgcacggatggcgccgcggctgagtgacgagagccccggtgcaggacttccccctcctggatcttcggccttcgcggggcaagatgtacgaaagtgtagaagtcggggggcttacccccgcccctaaccccttcctagtggtggacttttataaccagaaccgggcctgtttgctccaggagaaggggctccctgccccgggtccctactccaccccactccggactccgctttggaatggctcaaaccactccatcgagacccagagcagcagttcggaagagatagtgcccagccctccctcaccaccacccctgcctcgaatctacaagccttgctttgtttgtcaagacaagtcatccggctaccactatggggttagcgcctgtgagggctgtaagggcttcttccgacgcagtatccaaaagaacatggtgtatacgtgtcaccgggacaagaactgcatcatcaacaaggtgacccggaaccgctgccagtactgccggctgcagaaatgcttcgaagtgggcatgtccaaggagtcggtgcgaaacgaccgaaacaaaaagaagaaagaaacacccaagcccgagtgctcagagagctacacgctgacaccggaggtgggggaactcatcgagaaggtgcgcaaagccaaccaggagaccttcccggccctctgccagctgggcaagtacactacgaacaacagctcagaacaacgtgtctctctggacattgacctctgggacaagttcagtgaactctccaccaagtgtatcattaagactgtggagttcgccaagcagcttcccggcttcaccaccctcaccattgccgaccagattacccttctcaaggctgcctgcctggacatcctgattctgcgaatctgcacgcggtacacacctgagcaagacacaatgaccttctcagatggactgaccctgaaccggactcagatgcacaacgctggctttggccccctcaccgacttggtctttgccttcgccaaccagctgctgcccctggagatggacgatgctgagaccggactgctcagtgccatctgcctcatctgtggagaccgacaggacctggagcagccagacaaggtggacatgctgcaggagccgctgttggaagcactgaaagtctatgtccggaaacggaggcccagccagccccacatgttccccaagatgctgatgaagatcacggaccttcggagtatcagcgccaagggagctgaacgggtgatcacattgaagatggagatccctggttccatgccaccacttatccaggaaatgttggagaactctgagggcttggacactctaagcggacagtcggggggcggaacacgagatgggggtggcctggcccctcctccgggtagctgtagccccagcctcagtcccagctcccacagaagcagcccagccactcaatccccatgaccacctcgacacatggacagccctcacccctgccctggctttctctgccttcctactggccatgtgacctatcagcccagccctgcttgtccttccggacagaactggggaccttccaggggggacaggagggagaaggcagtgactctgtggacagaggcctggaccctgagatggactgctctctcctggcagcctgggctggcatcaggggccaggcattgagccacgtgaggacctgggcctgagccctcacccagcttgccatgtcttcatcaccagcaaacaccagggcctggctccctgtcctccgaactcaagccatcaccccccagttggggaacttccccctgcttcggatggtgacagaagatgcccagggtgggggagaccccctgtacatatcctgcgtaccaacccccagatattaattctcgatggttttgtttttattttaattttttttgttttgtttttttttaataagaattttcattttaagcacattta

SEQ ID NO: 680 - DNA, 170 bp, Rattus norvegicus (rat)
gatgtcaacagagtaacctaccagggctactccccctaccagcttacgtggggccgcccaagtacccggatacagcagcagctgggccagctgaccctggaaaatcttcagacgctgcccgagagtgaggatgaggagagctatgacacggagtcagaattcacggaaga

SEQ ID NO: 681 - DNA, 924 bp, Rattus norvegicus (Norway rat)
cctggtggttccgcagccgtactctcctggcctggtgtgcacagcctcaccatgagttcttctgcagccagcccgcttttcgcgcctggcgaggactgcggccccgcgtggcgcgcggcccccgcggcctatgatacgtctgacacgcacctgcagatcctgggcaagccagtaatggagcgttgggagaccccctacatgcattcgctggcggctgctgctgcctccagagggggccgggtcctggaagtgggctttgggatggccattgcagcctccagggtgcagcaggcccccataaaggaacactggattattgaatgcaacgatggggtcttccagcgtctacaaaactgggccctgaagcagccacataaggttgttcccttgaaaggcctgtgggaggaggaggcacctacactgcctgatggtcactttgatgggattctatacgacacatatccactgtctgaagagacctggcacactcaccagttcaactttattaagactcatgctttccgtttgctgaagcctgggggtatcctcacttactgcaacctcacgtcctggggggaactcatgaagtccaagtacacagacatcactgccatgtttgaggagactcaggtgcctgcactgctggaagctggcttccagagagaaaacatctgtacagaggtgatggcgctggtgcccccagccgactgccgctactatgccttccctcagatgatcacacccctggtcaccaagcactgagcggctggcccagggctacaaggagaatatgtcctcctcagtgcctttgtagctggagtgtggctccagcctctccactatccctgcagtgtgacatcctaacctctgcctggtacggccatctccccagagctcaggagtaaaataaatgctaccaagact

SEQ ID NO: 682 - DNA, 8048 bp, Rattus norvegicus (Norway rat); identical to SEQ ID NO: 223
  misc_feature (2005)..(2005): n
  misc_feature (3503)..(3503): n

SEQ ID NO: 683 - DNA, 602 bp, Rattus sp.
  misc_feature (564)..(564): n
gacaaggacaaaggcttgttttattttaatgactgatccacgtgaggccacagcctggccactatgtacagacacgagggacgcttcatttcttggtctcttcctccttggacagagtcttgatgatctcctccttcttggcttggaggcgctcctcccgacgctttcgtgcttccttggtcttagacctgcgagcctcagcctggtcagccagtagcttcttgcgggccttgtctgccttcagtttgtggatgtgctccatgagaatccgcttgtttttgaacacattccctttgaccttcaggtacaggctgtgatacatatgacggtcaatcttcttagattcccggtatctcctgagaagccggcgcaggatcctcatccttcgcatccaggtcaccttctcgggcatccgagcgttggcagtacccttcctcttccctatgcccatatgcctgcccttccgtcgggccaaggtgttcttccggcatcgagcccgggaatggacagtcacaggcttccggatgatcaggccatcttgatcagcttcctgatctgttgacnaagttggcattggcaagttcgttggtttcattggggtc

SEQ ID NO: 684 - DNA, 618 bp, Rattus sp.
caaccacagaagagtttattactccaatgattcgcacagctgggttgcaggtctaagggttgcctgccttcctggaggcactcccccacttccccctctgggggaattacacttggccatggaccccataaacctctgaatgcatttatttagaattttggacatctgcgttatttccctctgaaaatgctaaccaccgtgtgctgcccaccccacggcctgccagtccagcctgcagagggccattcacgctgccttgtaattccgaaataaatagaattggtagcaagtgagtgctgagtgatgtcaggatggccccagcagcctccagaggggcactgtggggacagtctcaaggtgtcttctgatgggcgggcactgtgcagcgtgtggcagtaccaggctgcctacagtttgtccaggaagttgtccagcgctgggatgccctccttcaggcctttgcgcttgcgggtctcagctacaacttggctggggcggctgctgttgtcaaaggggtccccaggcaggatctgccagtggtcaaacacacactgggggaaggcctggccaccagtgttggatcgaaggtcggcagtgaagccaaaggattcattgaca

SEQ ID NO: 685 - DNA, 6335 bp, Rattus norvegicus (Norway rat); identical to SEQ ID NO: 580

SEQ ID NO: 686 - DNA, 744 bp, Rattus rattus (black rat); identical to SEQ ID NO: 586

SEQ ID NO: 687 - DNA, 444 bp, Rattus norvegicus (rat)
aagccaaggatgagctgtagaggccacaccacctgcctccagggctggactgaggcctgaacaccccgccacagagctggctgctcccaataatgtctctatgagactcaagaacttttcatttttttttcaggcaggttcaggtctggggtggattctgatttttgttcccctgcctccccatcctccccacccccctttttttttactggtgtttgtctttaattcttcagccctcacctcctggcctctcatttttgaatcaacattttttctttctgtccctttctccatctcttggtcactatcctccaactctaggaacaggtatggaggaaaagcctaggcttgagatttcatctgctctcctttctgaatctcagaggagggtaggagaagggggtggtatcttccctccccccagcactgaggaagaatggggct

SEQ ID NO: 688 - DNA, 1021 bp, Rattus sp.
acagagttccatcatgagaacctcatgatctccctgctctctctcttctttgctggcactgagaccggcagcaccacactccgctatggtttcctgctgatgctcaagtacccccatgtcgcagagaaagtccaaaaggagattgatcaggtgattggctctcacaggccaccatcccttgatgatcgtaccaaaatgccatacactgatgcagtcatccacgagattcagagatttgcagatcttgccccaattggtttaccacacagagtcaccaaagacaccatgttccgagggtacctgctccccaagaacactgaggtgtatcccatcctgagttcagctctccatgacccacagtactttgaccatccagacaccttcaatcctgagcacttcctggatgccgatgggacactgaaaaagagtgaagcttttatgcccttctccacaggaaagcgcatttgtcttgacgaaggcattgcccgaaatgaattgttcctcttcttcaccaccatcctccagaacttctctgtgtcaagccatttggctcccaaggacattgacctcacgcccaaggagagtgacattgcaaaaatacctccaacataccagatctgcttctcagctcggtgatcgggctgaggcagccaggtgccccagttctgttgggaatggcctcatgtttctgcctctgggggacctgctgaaaaccaggctcaaggccactgctcacatcttcctattgcagttctccaaagtcccaaggcttgttcttattcctgtgaatggcactgaagaagtcaatcgactgtcttattttgacatgtgaacagagatttcatgagtacacatctcatgctgagtcacttccctcttcctcctaatagcccacgtccccacttatcagccctccatggtctgtgatctgtgctaatggactctgtatatggtctcagtgctatgtctacagacttacatagtatgtatggttcaggtaaacagaatcacagagtgtgtg

SEQ ID NO: 689 - DNA, 1867 bp, Rattus norvegicus (Norway rat)
agctttgcttctcagtggaaaagtaattttaacaagcaatttagtagttgattgagcaaatgcattgcaaaaaagaatgcttttgggacagcgttttcttcagagggagtacccagagctggcactcctgagccagtggcccagcatccagggagagatatgcttgtcatcaccgaagcctgatgctgtagagccacaccctggtattggccaatctgctcacacaggacagcgagagcaggagccaggcagagcataaaaggtggggcgggatcagtcgctcctcacatttgcttctgacatagttgtgttgactcacaaactcagaaacagacaccatggtgcacctgactgatgctgagaaggctgctgttaatggcctgtggggaaaggtgaaccctgatgatgttggtggcgaggccctgggcaggttggtatccaggttacaaggcaagtagaagtttggtgcttggagacagaggtctgctttccagcaggcactaacttttattgtatcctggctatgtttccctttgtaggctgctggttgtctacccttggacccagaggtactttgatagctttggggacctgtcctctgcctctgctatcatgggtaaccctaaggtgaaggcccatggcaagaaggtgataaacgccttcaatgatggcctgaaacacttggacaacctcaagggcacctttgctcatctgagtgaactccactgtgacaagctgcatgtggatcctgagaacttcagggtgagtctgatgggctcctcgctgggtgtccttcctgtggctttcctgctcaaattcctatcagaaggaaagaggaagccactctagggagcagttttgatgatgatgtgtggatgtgccctgtggagtgttgacaggagtccagttattttatcctctattcacaatcacttctccctctcactctattattctatgttgtcatttcctctttctttggtaaacttttaattttcagttgcagttttttctttttaaaaaaattaattaactgacttatttactttccatcccgatctcagcttcccctcctcctctcttcccagtccttctctctgctttctattaccctacctctttcttttctcctcagtccattttctcttttttcaatcaactttttgttttcttttaaatatttcttagtaactttctctgaggacaaggaagatatgtgagtccctgtttcttcccacagctctaaagagtagtagcagtaattggctttcatgccagagtggaagagaagaatatattttacaataaattctgtctgacatagaagaattctcattataatttttcagtactttaagttggaaacgaaaacaccatttgaaatgagcctgaagtgtctggtatttttgctctgcaattatgttgatggttcttccctcttcccacagctcctgggcaatatgattgtgattgtgttgggccaccacctgggcaaggaattcaccccctgtgcacaggctgccttccagaaggtggtggctggagtggccagtgccctggctcacaagtaccactaaacctcttttcctgctcttgtctttgtgcaatggtcaattgttcccaagagagcatctgtcagttgttgtcaaaatgacaaagacctttgaaaatctgtcctactaataaaaggcatttactttcactgcaatggtgtgttaaattaattgtatctcatagaagggttcatgcttaggtttcaaggtacaaagcagtgagggttcagttctgaccttggggaaataaatgatttgtgcttcatgatatatgctgggacagtaagctataaggcacagctcctaatgctccc

SEQ ID NO: 690 - DNA, 153 bp, Rattus norvegicus (rat)
gccatgccccgtgtctcacagcattgtaacgttctccctggtgcccccttggcatgtatcccttgcttggccacctcagcctccctccccaccatacactctatcctgaactacagaggaacagagagcagacaaacgtcagaatgagagcag

SEQ ID NO: 691 - DNA, 654 bp, Rattus sp.; identical to SEQ ID NO: 30

SEQ ID NO: 692 - DNA, 3622 bp, Rattus norvegicus (Norway rat); identical to SEQ ID NO: 548

SEQ ID NO: 693 - DNA, 1884 bp, Rattus norvegicus (Norway rat)
caagcctttgctggagaccgctcctgtccagtccgcagctggcttcagcgccactcaggacaccggaaagatggcaccgattgccggcaagaaggccaagaggggaatcttagaacgcttaaatgctggcgaagtcgtgatcggagatgggggatttgtctttgcactggaaaagaggggctacgtaaaggctggaccctggaccccagaggctgcggtggagcaccccgaggcagttcggcagcttcatcgggagttcctcagagctggatcgaacgtcatgcagaccttcactttctatgcaagtgaggacaagctggaaaaccgagggaactacgtggcagagaagatatctgggcagaaggtcaatgaagctgcttgtgacattgcacggcaagttgctgacgaaggggatgcattggttgcaggaggtgtgagtcagacaccttcctacctcagctgcaagagtgagacggaagttaaaaagatatttcaccaacagcttgaggtcttcatgaagaagaatgtggacttcctcattgcagagtattttgaacatgttgaagaagccgtgtgggcagtcgaggccttaaaaacatccgggaagcctatagcggctaccatgtgcatcggacctgaaggagatctacatggcgtgtctcctggagagtgcgcagtgcgtttggtaaaagcaggtgccgccattgtcggtgtgaactgccacttcgaccccagcaccagcttgcagacaataaagctcatgaaggagggtctggaagcagctcggctgaaggcttacttgatgagccacgccctggcctaccacacccctgactgtggcaaacagggatttattgatctcccagaattcccctttggattggaacccagagttgccaccagatgggatattcaaaaatacgccagagaggcctacaacctgggggtcaggtacattggcggctgctgcggatttgagccctaccacatcagggccattgcagaggagctcgccccagaaaggggatttttaccaccagcttcagaaaaacatggcagctggggaagtggtttggacatgcacaccaaaccctggatcagggcaagggccaggaaagaatactggcagaatcttcgaatagcttcgggcagaccgtacaatccttcgatgtccaagccggatgcttggggagtgacgaaaggggcagcagagctgatgcagcagaaggaagccaccactgagcagcagctgagagcgctcttcgaaaaacaaaaattcaaatccgcacagtagccacaggccagcggttcggggcgaattcctccaggtccgggccacagtgtgcacccggaaggagaaggcatctctaaaccagcgtttgtgttgatgccggcttacacctgtgattggtgctagttagacaaaatggagtcacagatagcatttcacagttacaaaactacgctttagaattttacctagaaggaagaaaggagaagtccacagtaaatcctgaacacatttcctacgtgcctgtcgcattacaggcgcacaggagtcactgcagcgaagagaaagtcacccgacgtcaatctcatttcagatagggggataggacaccacctccacgagtgacatagaaccattcagggaccgtatcataagtgacacagcaaccatctatatctaagatgcttcccaagtggattccaagatcttttgagcaggacccttaggcagaaacaacacacaccagccctgtaaaacttaacagataactgatccattctgtaattctgtaatctctgttctgactgcttccattccatttcattaataaaaacatgccggttgaaaaccttcaaaaaaaaaaaaaaaaaaaa

SEQ ID NO: 694 - DNA, 4198 bp, Rattus norvegicus (Norway rat)
gacgcgctgagccgctgccgccgcgggggggaagcctgcgagtagctcgcgtgcccgcagtccgcgtaagccccgcgccccttccacccctggccaggccatggcggaacgtggaggggcgggcggtggtcccggaggcgccgggggcggcagcagtcagcggggctctggggttgcccagtccccgcagcagcagccgccgcagcagccatctcagccgcaacagccaacgccccccaaactggcccaggccacctcgtcctcctcgtccacctcggctgcggccgcctcctcctcgtcctcctccacctccacctccatggccgtcgcggtggcctcgggctctgcgcctcccggcggtccgggaccaggccgcacccccgccccagtgcagatgaatttgtatgctacctgggaggtggaccggagctcatccagctgcgtgcccagactcttcagtttgactctgaagaaacttgttatgcttaaagaaatggacaaagatcttaactcagtagtcattgctgtgaagctgcagggttcaaaaaggattcttcgctctaatgagatcatccttccagccagtggcctggtggaaacagagctccagttaaccttctccctccagtaccctcatttccttaagcgagatgccaacaaactgcagattatgttgcaaaggaggaagcggtacaagaaccggactatcttgggctataaaaccttggctgtgggactcatcaacatggcagaggtgatgcaacaccctaacgagggtgctttagtacttggcctgcatagcaacgtaaaggatgtctctgtgcctgtggcagaaataaaaatctactctttatccagccagcccattgaccatgaaggaatcaagtctaagctgtctgatcgctccccagatattgacaactactctgaagaagaggaggaaagcttctcctcagagcaggaaggcagtgatgacccattacatggacaggacctattctatgaagatgaagatcttcggaaagtaaagaagactcgaaggaaactgacctcaacctcagccatcactaggcaaccgaacatcaaacagaagtttgtggccctcctgaaacgattcaaagtttctgatgaggtgggctttgggctagaacatgtgtcaagggagcagattcgggaagtggaagaggacctggatgaactatacgacagtctagaaatgtacaaccccagcgacagtggccctgagatggaagaaacagaaagcatcctcagcaccccaaagcccaagctcaagcccttctttgaggggatgtctcagtccagctcacagacggagatcggcagtctcaacagcaagggcagccttggaaaagacaccaccagccctatggaattggcagctttagaaaaagttaagtctacttggattaaaaaccaagatgacagcttgactgaaacagacactttagaaatcactgaccaggacatgtttggagatgcgagcacaagtctggttgtaccagaaaaagtcaaaactcctatgaagtccagcaaagctgatctgcagggctccgcctcgccgagcaaggtggaagggacacacacacctcgccaaaagaggagcactcccctgaaggagcggcagctctccaagcccctgagtgagaggaccaacagctctgacagtgagcgctctcctgacctagggcacagcacacagattccacgaaaggtggtatacgatcaactgaatcagatcctggtttccgatgcagcgctccctgagaatgtcatcctggtgaacaccacggactggcagggccagtatgtggccgaattgcttcaagaccagaggaagcctgttgtgtgtacctgctcaacagtggaggtccaggccgtgttgtctgccctgctcactaggattcagcgctactgcaactgcaactcatctatgccgaggccagtcaaggtggcagctgtgggcagccagagttacctgagctccatccttcggttttttgtcaagtcccttgccagcaagaccccggactggctgggccacatgcgcttcctcatcgttcccctaggttctcatccagtggccaaatacttgggctcagtagatagtagatatagcagcacctttcttgattctgcttggagagacctgttcagtcgctcagagcctccagtgtcagagccactggatgtggtgggtcgtgtgatgcagtatgtcaatggagctaccacaacgcaccagctgcctgtggctgaagccatgttgacctgcaggcataagttccctgatgaagactcctaccagaagtttatccccttcattggtgttgtgaaagtgggccttgttgaagactcgccctccactgcaggtgatggggacgattcacctgtggtcagccttactgtgccctccacatcaccaccctcaagctcgggcctgagccgagatgccacagctacccctccctcatccccatccatgagcagtgccctcgccatcgtggggagcccaaatagcccttatggggatgtgattggcctccaggtggattactggctgggccaccctggggagcgaaggagagaaggtgataagagggacgccagttcaaagaataccctcaagagtgtcttccgctcagtgcaggtttctcgcctgccccatgcaggggaagcccagctttctggcaccatggcaatgactgtggtcaccaaagagaagaacaagaaagtgcccactatcttcctgagcaagaagccccgggaaaaggaggtggattctaagagccaagtcatcgagggcatcagccgcctcatctgttctgcaaagcagcagcaaaccatgctgagagtgtccattgatggagttgaatggagtgacatcaagttcttccagctggcagctcagtggcccactcatgtcaagcacttcccagtgggactcttcagtggcagcaaacccacctgagacctgcctcccaaccactccctcctggcactgccacccagcccagcctcctttcctagcactggggcttgcctccacttgcccagtcctgaaggacactgccactggggatgcagtcctccctgctcactgcccagccatctctgcccagctcccccctgttccaggcccagagctgggtgatcctgccttctggtgcccataattcctgtaattgaataatctgggccttccttcacctcacccctgcagcgctggtaccctttctagaaatgaaacacctggagttctggtacacagggagacagcccagcatcctacataagctggccacccagctctgcatttctaaggctctgttgcctgttgtactcaccctgccttcctccagcagggctggggcctcctgccattcctcacctgcctcacagtttcccagtagggggaaggaggatggcacctgggcatcctggagtttctgggattgaagggaccttcccagtctcccatgcatgatttcctgacacttcaagtcgcttggatgtcctgtgttttgtgtgtttttagttgtttgggtaacttgtcctgtgcacaggtccttaaggctccttctccctctgcctcccagcctcctacctaacattgctctgtggcttcatgaggtaggagacagcaaacccacccacccacccaccccttcacccctcaacacatacatcatctgtggctctcatccagtcatattgtccccctctcctgtgtcagcttgcctcctggctctgctctgtcatcccacttccttcatggcagggcagcagaatgaggcccttctccaccaggtctccctccagcagcctccttccctctctcagccatgaatgggtcccagacctacctcagcctccttatcagtgtcttcatgagaggctgaggacaagggacagatctggcccagcctccatgccctctgtgtcctatggcacctcagagcttctccgttgcccctcagtgtttcctagcagtgtggcacggaactgcacttggaacctagttttggtgttcttcacatccaaaactcttaagcccctcccgctgcccagcctgtccagagtatctcctgggcctgagaataagtggggtgggaagactggggccatgttgggttttttcattcaataaactggtgatttcttaccaaaaaaaaaaaaaaaa

SEQ ID NO: 695 - DNA, 2051 bp, Rattus norvegicus (Norway rat)
tggcaaccctgaacatcaggagtcagcaatcacagaggcaggcagctggctggtatcgctctgcagcctgaagactggagaagatgacccgccttgtgactctggagctcttgatggctgggatcggctctgctctcctctgcttcccagattgcatactgggagaggacactctattccatgaagaccaagacaaggggacacaactggacagtctcacattggcctccatcaatactgactttgccttcagcctctacaagaagctggctttgaggaatccagataaaaatgttgtcttctccccacttagcatctcagccgccttggccgtcgtgtccctgggagcaaagggcaacagcatggaagagattctagaaggtctcaagttcaatctcacagagacccctgagacagaaatccaccggggctttggacacctcctccagaggctcagccagccaagggacgagatacagatcagtacaggcaatgccctgtttattgaaaaacgccttcaggtcctggcagagttccaggagaaggcaaaggctctgtaccaagctgaggccttcacagctgatttccagcagtctcgtgaggccaaaaagctcatcaatgactatgtgagtaaacagacccaggggaagatccagggactgatcacaaacctagctaagaagacatccatggtactggtgaattacatctactttaaaggcaaatggaaggtgccttttgaccctcgggacacattccagtctgagttctactctggcaaaaggaggcctgtgaaagtgcccatgatgaagcttgaggacctgaccacaccctacgtccgggatgaggagctgaactgcactgttgtggagctgaagtacacaggaaatgccagcgccctgtttatcctccctgaccagggcaagatgcagcaggtggaagccagcttgcaaccagagaccctgaggagatggaaggactctctcaggcccagcatgatagatgagctctacctgcccaagttctccatctctgctgactacaacctggaggacgtccttccagagctgggcatcaaagaagtcttctccacacaggctgacctgtctgggatcacaggggataaggacctgatggtctctcaggtggtccacaaggctgttctggatgtggctgagacaggcacagaagcagccgctgccacaggggtcaaatttgttccaatgtctgcaaaactggaccctctgattatagctttcgaccggcctttcctgatgattatctctgacacagaaactgcaatagctccctttttggccaagatatttaaccccaaatgagattcgaacttcccaagagttgatcgttctcctgaggcattgagcctgtctgtgggtctctgtgtgcatttttggcttctatgctctgattggccatggcggcatgcctggatgagacagtaactaactgtgtaacagcctcatgtacagacgcctgtgcagagtcgctgccatgctcccaaacttcttggtaccactagctcatatttctgagcctaaaatttgtctttcccctgcccttgctctctctcccctgtatctgcctcaacccagaagccagggccccatcaggttgtctcagtcccttcttaggccttagttatatcttccttcagcgttgctgtcttgatgggactgtgcacgattaccggccaacccacatggaccaagaagaacacttgctggtccgtatctttctgcagtatgtgggatcacttggtgcccagtgctgcctcactatttccttcctctgggcactgctccttgcagcatggcctgaccttgtccacatctggcacagagctggagccctcccttctgcagatgcatggcacctgtgggtcagaccagatccccctccccagcactcctacttagagcaatgcagcctttcttttagttcccagctgaccaacctcacacaaaagatgaccaacaacaaccaaaatgaagaggtaggagcaaaggatcaataaacacatcactgcattg

SEQ ID NO: 696 - DNA, 1003 bp, Rattus norvegicus (Norway rat)
tgggcaccatcagcagagagattgtcccgacagagaggcaattctattccctaccaacatgaagctgttgctgctgctgctgtgtctgggcctgaccctggtctgtggccatgcagaagaagctagtttcgagagagggaacctcgatgtggacaagctcaatggggattggttttctattgtcgtggcctctgataaaagagaaaagatagaagagaacggcagcatgagagtttttgtgcagcacatcgatgtcttggagaattccttaggcttcacgttccgtattaaggaaaatggagtgtgcacagaattttctttggttgccgacaaaacagcaaaggatggcgaatattttgttgagtatgacggagaaaatacatttactatactgaagacagactatgacaattatgtcatgtttcatctcgttaatgtcaacaacggggaaacattccagctgatggagctctacggcagaacaaaggatctgagttcagacatcaaggaaaagtttgcaaaactatgtgtggcacatggaatcactagggacaatatcattgacctaaccaagactgatcgctgtctccaggcccgaggttgaagaaaggcctgagcctccagattgcagggcaagatctatttcttcatcctttgttctatacaatagagtgcctctctgtccagaagtcaatccaagaagtgcttaatgggttcctttattctttcttcctggattactccgtgctgagtggagacttctcaccaggactccagcattaccatttcctgtccatggagcatcctgagacaaattctgcgatctgatttccatcctgtctcacagaaaagtgcaatcctggtctctccagcatcttccctagttacccaggacaacacatcgagaattaaaagctttcttaaatttctctttgccccactcatgatcattccgcacaaatttcttgctcttgcagtgcaataaatgattacccttgcactt

SEQ ID NO: 697 - DNA, 924 bp, Rattus norvegicus (Norway rat); identical to SEQ ID NO: 681

SEQ ID NO: 698 - DNA, 959 bp, Rattus norvegicus (Norway rat)
agagggagcagctttttaacaagagaactcaagcaattgctgccatgccggggaagccagtccttcactacttcgatggcagggggagaatggagcccatccggtggctcctggctgcagctggagtagagtttgaagaacaatttctgaaaactcgggatgacctggccaggctaaggaatgatgggagtttgatgttccagcaagtgcccatggtggagattgatgggatgaagctggtgcagaccagagccattctcaactacattgccaccaaatacaacctctatgggaaggacatgaaggagagagccctcatcgacatgtatgcagaaggagtggcggatctggatgaaatagttctccattacccttacattccccctggggagaaagaggcaagtcttgccaaaatcaaggacaaagcaaggaaccgttactttcctgcctttgaaaaggtgttgaagagccatggacaagattatctcgttggcaataggctgagcagggctgatgtttacctagttcaagttctctaccatgtggaagagctggaccccagcgctttggccaacttccctctgctgaaggccctgagaaccagagtcagcaacctccccacagtgaagaagtttcttcagcctggcagccagaggaagccattagaggatgagaaatgtgtagaatctgcagttaagatcttcagttaattcaggcatctatggatacactgtacccacaaagccagccttcgaaagctttgcaacaatcgcatattttgactaaatgttgaccctacttattgggaggccaacacgttttctaatgcttctgtgttaattcatatagacatgactgatgaggaattgctgggatgctatttggttgtagttaaaatttgaaatcatgatcacttcctcagatattactttgaatctcaataaaaacttcgcaagctt

SEQ ID NO: 699 - DNA, 2638 bp, Rattus norvegicus (Norway rat); identical to SEQ ID NO: 209

SEQ ID NO: 700 - DNA, 2495 bp, Rattus norvegicus (Norway rat)
attgcctaccccgggtggagaccgtgctcgtccggccctcttgcctcacgttctgcagctctgcagctccgcaatcctacaccatggcggacagccgggacccagccagcgaccagatgaagcagtggaaggagcagcgggcccctcagaaacccgatgtcctgaccaccggaggcgggaacccaataggagataaacttaatatcatgactgcggggccccgagggcccctcctcgttcaagatgtggttttcaccgacgagatggcacactttgacagagagcggattcctgagagagtggtacatgcaaagggagcaggtgcttttggatactttgaggtcacccacgatattaccagatactccaaggcaaaggtgtttgagcatattgggaagaggactcctattgccgtccgattctccacagtcgctggagagtcaggctcagctgacacagttcgtgaccctcgtgggtttgcagtgaaattctacactgaagatggtaactgggacctcgtgggaaacaacacccctattttcttcatcagggatgccatgttgtttccatcctttatccatagccagaagagaaacccacaaactcacctgaaggaccctgacatggtctgggacttctggagtctttgtccagagtctctccatcaggttactttcttgttcagcgaccgagggattccagatggacatcggcacatgaatggctatggctcacacaccttcaagctggttaatgcgaatggagaggcagtgtactgcaagttccattacaagactgaccagggcatcaaaaacttgcctgttgaagaggcaggaagacttgcacaggaagacccggattatggcctccgagatcttttcaatgccatcgccagtggcaattacccatcctggactttttacatccaggtcatgactttcaaggaggcagaaaccttcccatttaatccatttgacctgaccaaggtttggcctcacaaggactaccctcttataccagttggcaaactggtcttaaacagaaatcctgctaattattttgctgaagttgaacagatggcttttgacccaagcaacatgccccctggcattgagcccagcccggacaagatgctccagggccgcctttttgcttacccagacactcaccgccaccgcctgggaccaaactatctgcagatacctgtgaactgtccctaccgtgctcgcgtggccaactaccagcgcgatggccccatgtgcatgcatgacaaccagggtggtgctcccaactactaccccaacagcttcagcgcaccagagcagcagggctcggccctggagcaccatagccagtgctctgcagatgtgaagcgcttcaacagtgctaatgaagacaacgtcactcaggtgcggacattctatacgaaggtgttgaatgaggaggagaggaaacgcctgtgtgagaacattgccaaccacctgaaagatgctcagcttttcattcagaggaaagcggtcaagaatttcactgacgtccaccctgactacggggcccgagtccaggctcttctggaccagtacaactcccagaagcctaagaatgcaattcacacctacgtacaggccggctctcacatagctgccaagggaaaagctaacctgtaaagcacgggtgctcagcctcctcagcctgcactgaggagatccctcatgaagcagggcacaagcctcaccagtaatcatcgctggatggagtctcccctgctgaagcgcagactcacgctgacgtctttaaaacgataatccaagcttctagagtgaatgatagccatgcttttgatgacatttcccgagggggaaattaaagattagggcttagcaatcacttaacagaaacatggatctgcttaggacttctgtttggattattcatttaaaatgattacaagaaaggttttctagccagaaacatgatttgattagatatgatatatgataaaatcttggtgattttactatagtcttatgttacctcacagcctggtatatatacaacacacacacacacacacacacacacacaccaaaacacacatacactatacacacacacacacacacacactaaaacacacatacacaacacacacatacactacacacacagaacacacaacacaaacatacacacataggcacacacacacacacacacacacacacacacacacacacacacacacatgaatgaagggattataaagatggcccacccagaatttttttttatttttctaaggtccttataagaaaaaccatacttggatcatgtcttccaaaaataactttagcactgttgaaacttaatgtttattcctgtgtagttgattggattccttttccccttgaaattatgtttatgctgatacacagtgatttcacatagggtgatttgtatttgcttacatttttacaataaaatgatcttcatgg

SEQ ID NO: 701 - DNA, 1292 bp, Rattus norvegicus (Norway rat)
cgtagacttcttccctcctgcagcgaaggacagcatgagcacagctggaaaagtaatcaaatgcaaagcggccgtgctatgggagcctcacaagcccttcaccatcgaggacatagaagtcgcaccccccaaggcccatgaagttcgcattaagatggtggccaccggagtctgccgctcagatgatcacgcggttagtggatccctgttcacgcctcttcctgcagttctaggccacgagggagctggcattgttgagagcattggagaaggggtgacttgtgtgaaaccaggtgataaagtcatcccgctgttctctccccagtgtggaaaatgcaggatctgcaagcacccggaaagcaacctctgttgccaaactaagaatctgacacagcctaagggagctttgctcgacggcaccagcagattctcctgcaggggaaagcccattcaccactttctcagcaccagcaccttctcccagtacactgtggtagatgacatagcggtggccaaaatcgatgcggctgcaccactggacaaagtctgcctcatcggctgtggcttctcgactggctatggctctgccgtccaagtcgccaaggtgaccccaggctccacctgtgccgtgtttggcctgggaggtgttggtctgtctgtcgtcattggctgtaaaacagcaggagcagccaagatcattgccgtggacatcaacaaagacaagtttgcgaaggccaaagagttaggtgccactgactgtatcaaccctcaagactacaccaaacccatccaggaagttctccaggagatgactgatggaggggtggacttttcatttgaagtcattggccgtcttgacaccatgacttctgccctgttaagctgccattcagcatgcggtgtaagcgtcattgtcggggtgcctcccagtgcccaaagcctctccgttaaccccatgtcgctgctgctgggacgcacctggaaaggagcaatattcggcgggtttaagagtaaagatgccgtccccaaacttgtcgctgacttcatggctaagaagtttccgttggagccgctgattactcatgttttaccttttgaaaagataaatgaagcatttgacctgctccgtgctggaaagagtatccgtaccgtcctgacgttctgagaacacatgaatgccttcccggtttctgactcctccgcctaccgaatcaagcgccagccacatcacaaccttaaccttgctcttcagagacacacagccaataaagcacctgtgcaagctttccgtg

SEQ ID NO: 702 - DNA, 505 bp, Rattus sp.
gacagtctgaagcttttattcagtgggtctctgtgtctagaagaaggtgtttggcctcttggtggtgaagcgtggtttgtgctggcgccgcaacacacggtggggcaatgggaacttgatcttggagtcgtggaactgcttgacagctggccggcggcacttgccagctgcaatctcttccaccttcatgatctggatggagtgcgcacgggcacggtgtcgggcacccatgtctcggtagcactgtgtgaccgcgccggcagtggtcaggtcccggtactctcggtacatgttgtgagtgccacttcgggaatcatagcgcagccagatgccgaagttcttcacacgcaggggtgacttctcaaacacctgcccacagtacacaatttccccggatgacttcttcatcttcttcagctgcgacacaaagtaccagaagcgggacttggccaccacatggttgggtgcagattcgcattcggtacagtggcggtgtgtggcattt

SEQ ID NO: 703 - DNA, 400 bp, Rattus norvegicus (Norway rat)
tttttttttttttttatgttcagatgcatttattcagcaaaccttcttgctaaacattatggtagccctaaaagatttcgaaatcaggacattcagcaaagccctctcctctgaatgcggatagatgttccaaatttcctgttttcaaagcatagaatgcattcattggcgtaagtttttccgtcagtaccacacacaggatcataatccctggggcatccaacaagtgtattagggcaattagcctttttcccaatcaccttagctgtagtgttacctgctaaattgagcagggccaaagcactgagaagaaagataattgctaccttcatgggtgtagacctaggtccaaaactcagaagaactgtgcagggtgcttctcttcaacctcgtgccgaaa

SEQ ID NO: 704 - DNA, 635 bp, Rattus sp.
aacatttcactaacagaactaaactttatttccatgtttgttacatgtttgtcttggatgctgagtacatattagaattgacataacatacaacctgggagaaagtctgatattctccactgaatgagttaaaaaggaatgtaaaactacaaaatactactttacgtgtgagttctaaggtatgattaatacaacaacaaacatcttgctatttttctctaattttccgaggtggatttcactataaaagcttttttttctcatttcaagaaaggaagggctactcataaaaaatctttaagtatagggtacaaattagtctcaacacaaaattctactgcctacctaaaagttatgaattgaggggactaatgtcaactgcaaatctagtgtctgaaaggttagtctaatctaaggatgacacgcaaatacaactccatttgtcatttatgttaaccacttggtactcagaacggggtggccaaacactgcttagtgacagagatccaacatgaatctgttccaaggggaccagagccaagagggatgactcattctatctccggacccacactgtacacaaacggaaactactagtttacactacatgtttcaagacaaaattggcatgtgta

SEQ ID NO: 705 - DNA, 499 bp, Rattus sp.; identical to SEQ ID NO: 358

SEQ ID NO: 706 - DNA, 711 bp, Rattus sp.; identical to SEQ ID NO: 29

SEQ ID NO: 707 - DNA, 664 bp, Rattus sp.
gcaagcaatgcgcagacaaaaactaaatttattaattaaagattcatttgaataaattttgtacagaagaatagtatttattgcatctatagtataaaagaactgctcaccaagctttataaagtatgaagcaataaggaactaattacttaaagtgtttctatggaggtaagtgtcagggtaaattgagttataaccagaatacatcatatgtatgatgatgctaacattttaccaagttatttttatcataatgcttaatctgcttaatcatacatcatcatgatatgcgaaatcataattttttccaggattggaccacaacatcacgtctctgaactacaaatataaatatgttacaccaatcacatatttgtaaaaatttataaaataaaagttgactgggaatcctgtagcctggactgatgttcagaagaactcaatctgattcatcgctgctgaagtaggagctgtcgctgtactcagctgtgtaaaggaacttgtgaatgatcggattcatctttggtatccagtgtcggggaaccaggtacgatgagaggttaaataaatccacgaacaccttgtacctgtcgctcacagttgagcgcagataataatagcctgaggatcccccagtgccagccttgctgcctagcatcctgtg

SEQ ID NO: 708 - DNA, 536 bp, Rattus sp.
atattctttctattttttattaattgcggcacagagaaaagaagtcaaatgttcaaagaaatttgtgttccttagggtgttggttttacaccaacagaagagatgagtcctgagtcttcatgtctttttttctcagggtagcctgagatggttgtgatgtgtttaggctaaggcttctttgcttctagcaacaaggtttggcccctcagtggcgaagcagttatccttgtcggcagccttgcaacacttgtccacgaattgtgcgaagtcacccatcaccgtcttcagctgatcttctgtggccttgggcttgtgtttcaccagctcagcgagagccgtttgcttccttatctgcttctccttgtctgggagtgtgcagatatcatagtggaaggtgaaggtctcagctttaaactctttggggacatatgtctcgtcaactgtcatagcagtgaaacatggccgtctttccaccagggacccactacagcacttggtgaccttcacgctcactggggtcttctcatgcagcacac

SEQ ID NO: 709 - DNA, 577 bp, Rattus sp.
accctcactataaggactaagcttgcggacgctaaagtttttttttttttttttttttttttttattttgcatacttttaatttcagaacaaaataaaacaaacaaaaaaacacaatacacaacacccaaccctgctattctgtgggaggggatcttcctgccttaaggcacaaggacaggatagaagagattcttgtagacatgagcagagagccaggtgggtcagggccagtcaaggctgttgggggagccacagggatactatacagagggcgggggcttcccaggagcctttaatccacttcttccatgcgagaggcatcctcatcaccctccagtggggggatctcatcgggaacagcagcactgggctcttctgcagtgacctcatcttcatcaatgcccaggcctagtttaatcatgcggtagatgcggttggagtgggtttgggggtcctcaagtgagaagcagaggagagcagagcattctcaaacagcagcaccaccaggtctttgacagctttgtcctttttgtctgcctcagccttctgccgcaaagtctccacaatggggtggg

SEQ ID NO: 710 - DNA, 613 bp, Rattus sp.
aatttttatttcaaaagcttggatagcttcaatatccaggtcgtggcaaaatcaggacacgtgtaaaataccttacaatacattagattcccaaaaggtaccaaaaagtacagtaaaattaacacttccattactggaaatgtatgacacaaataatataaaattaaaaggtgaaaaaggtgacactggtttcctaagatacagtttactctttacaaccagggtccacaggtccaggctgcagagcggcagcaggaagcagaccctccaatctagaacagggtaacctggtaataaaatcagccccctaatgccgctctgacctctgagacgccacacgctgcctacaacaactagagctctggaatagtaaacaggagagtgatttccgggggaaattttaaataagatgcacatgggacaggccataaaagtttgccaagttaaatttggtacataattgtgttcactccgcgtccaaacaaagcgtgtgcggtcgtcactcggccgctcctgctgcctctcagtatggcttgtagttattctgatgaccaccacgtcgctggctcttcccgtaatttgtactaccctgactgtagtcgtagccggggcc

SEQ ID NO: 711 - DNA, 465 bp, Rattus sp.
ctcatttagtttttattcataatcataaacttaactttgcaatcctgctagacttgaaggggaatgaggaaaatatggaacccaaagaacttcagtgagagcagagattacagggtattgcgagcagatggggtgggggtgctctcctgagctacagaaggaatggtttgatgggtaaaatgcccgcaagtcaaagaaattagagttgtccacagtcggagatggtgatcttcttgctggtcttggcagtgcagataaaaaactgggaaccatttgtgtttggtccagcatttgccatggacaagatgccaggacctgtatgcttcaggatgaagttctcatcctagaaatttctctccgtagatggacttgccaccaatgccattatggcgtgtgaagtcaccaccctgacgcatgaatcctggactagttatgtgaaaggagtaacccctatagccaaatcct

SEQ ID NO: 712 - DNA, 582 bp, Rattus sp.
gggtagcataaattttctcaaactttaatcttcacaattattttcactctatacactttattgaaaaggtctagatttatttgacaaaatgattatgaccagaataaagatatcttctttttcatatatcagtaagtggctggaatagttaatttagtcatgtatcctggaaaatgagtttcaaaatcttcctctttttttttgaggtcagctactgtcaataatggacattaggcaatagatcataacacttcagtaacatgctgtgtcagaaccttgcataattcacacattcatttgctctctgctacattatgacttcatggattaaagtttattaaattccaaatatttcttgcaggagggaatgagtaaaacatcaggataatgctgtcttcatttttaaatatatattgttgttttaattgatacatagtaattgcacataattatggcacagtatgacgtttcaataatgtatagtgtacataataatcaaatgaaggtaattggcatgtcacaccagatgtaactatttcctttctttctgggacatggctattggacatagtcaattaattg

SEQ ID NO: 713 - DNA, 1840 bp, Rattus norvegicus (Norway rat)
cgagaaactacaggcaaactttcagctttgaagttgtcaccttggagaagtgaagtcgagaagtgtgacaccatgaatggacctgtggatggcttgtgtgaccattctctaagtgaagagggagccttcatgttcacatctgaatcggtaggagaagggcatccagataagatctgtgaccagattagtgatgcagtgctggatgcccatctcaagcaagaccccaatgccaaggtggcctgtgagacagtgtgcaagacagggatggtgctcctgtgtggagagatcacctcaatggccatgattgactaccagcgggtggtgagagacaccattaagcacattggctacgatgactctgccaagggcttcgacttcaagacctgcaatgtgctcgtggctctggagcaacagtccccagacattgcccaatgtgtccatctagacagaaatgaggaggacgttggtgcaggagatcagggtctgatgttcggctatgccactgacgagacagaggagtgcatgccgctcaccattgttcttgctcacaaactcaacacccggatggcagatctgaggcgctctggtgtccttccctggctgagacctgattctaagactcaggtaacagttcagtacgtgcaggataatggtgctgtcatccctgttcgcgtccacaccatcgtcatctctgtgcaacacaacgaagacataacactggaggccatgcgagaggccctgaaggagcaggtgatcaaagctgtggtgccagccaagtacctggatgaagacaccatctaccacctgcagccaagtgggcggtttgtcatcggaggtccccagggggatgcaggtgtcacaggccgcaagattattgtggacacatacggaggctggggtgcccatggtggtggtgccttctctggaaaggactacaccaaggtggaccgctcagcagcttatgccgcccgctgggtggccaagtctctggtgaaggctgggctctgccggagagtccttgttcaggtgtcctatgccattggtgtggcagaacctctgtccatttccattttcacctacggaacttccaagaagaccgagcgagacgagctactagaggttgtgaacaagaactttgacctccggccgggtgttattgtcagggacttggatctgaagaagcccatctaccagaagactgcatgctatggtcatttcggaagaagcgagtttccctgggaggtccccaagaagcttgtgttttagagctgccgggaagcttagctctgtcctatactcaacctcctcaagatctcaactccctggtctcagagagccctccctgcttcccaccctatgcaaagccagcttcctccgattttccccctacccggcaatctgcaaacatcttaatagtggcaaggcaggtggtttctggtgctaggtcatcaggtctccttgcaaggatagtcagtgttccctccctgtctctcagatgacaacaatgttaattttgtgtaaaagttgctcctgtcatcccctcccgtagtctgaagctaaccaggccatctcttcctccgtcctggacatgtgcccagatgaatgttttgtcccatatctctggcttcccctttacattggcagccagaggtcctgagccggggcttcctcagggtccctctgagactgggcatctgctccctaggatatggtcagtgtcccctgaacatctgcattctgtgagggactgagctgtgtgttcttcatcccaacacaataaggtggtatcgtcattatccacagtgacagatggggaaactgaggctcagagagcgagctc

SEQ ID NO: 714 - DNA, 1628 bp, Rattus norvegicus (Norway rat)
ctgtattgagtgttggccagtggtctttggtagcctgggcagcagcggggcagacatggagctgctggctgggactggcctgtggcccatggccatattcacagtcatcttcatattactggtggacctgatgcaccggcgccagcgctggacttctcgctaccctccaggccctgtgccgtggcctgtgctgggcaacctgctgcaggtggacctctgtaacatgccatacagcatgtacaagcttcaaaaccgctatggtgacgtgttcagcctacagatgggttggaagccagtggtggtgatcaatggactgaaggcagtgcaggaactgctggtgacctgtggagaggacactgctgaccgccctgaaatgcccatctttcaacatataggctatgggcacaaagctaaaggtgtggtgcttgcaccttacgggcctgagtggcgagagcagaggcgattctctgtgtccaccctgcgcaacttcggtgtgggcaagaaatccctggagcagtgggtgacagacgaggccagccacctctgtgatgccctcaccgctgaggcagggcggcccctcgatccttacaccctcctgaacaaggctgtgtgcaatgtaattgcatctctcatttatgcccgccgcttcgactatggagaccctgatttcatcaaggtgctaaaaatattgaaagaaagcatgggagagcaaactggcttgtttcctgaggttttgaacatgttcccagttctcctgcgcatcccagggttagctgacaaagtcttccctgggcaaaagacatttctcaccatggtggataacctggtgactgagcacaagaagacttgggaccctgaccagccacctcgagacctgactgatgcctttctggctgagatagagaaggccaaggggaaccctgagagtagtttcaatgatgcaaatctacgtctggtggtcaatgacctgtttggtgctgggatggtgactacttctatcactctaacctgggccctgctgctcatgatcctgcatccggatgtgcagtgccgagtacaacaggaaatcgatgaggtcatagggcaggtgcggcatccagagatggcagaccaggcccacatgccgttcaccaatgctgtcatccatgaggtgcagcgctttgcagacattgtcccaatgaatttgccacacaagacttctcgtgacattgaagtgcagggcttccttatccctaaggggacaaccctcatccccaacctgtcctcagtgctgaaggatgagactgtctgggagaagcccctccgattccaccctgaacacttcctggatgcccagggcaactttgtgaagcatgaggccttcatgccattctcagcaggccgcagagcatgcctgggggagcccctggcccgcatggagctcttcctcttcttcacctgcctcctgcaacgcttcagcttctccgtgcccactggacagccccggcccagcgactatggtgtctttgcctttctccttagcccttccccctaccagctctgtgcattcaaacgttagaaggaaagaaattctagtccagcctctaccttagtgtcatacacagattaaaacagttctgtggctgcca

SEQ ID NO: 715 - DNA, 1272 bp, Rattus norvegicus (Norway rat); identical to SEQ ID NO: 97

SEQ ID NO: 716 - DNA, 1816 bp, Rattus norvegicus (Norway rat)
ccccctcggcccgccatgctcctttcggtgccgctcctgcttggcctcctcggcctggctgccgcagaccctgccatctatttcaaagagcagttcttggacggagatgcctggaccaaccgctgggtcgaatccaaacataagtctgattttggcaaattcgtcctcagttctggcaaattctacggggaccaggagaaggataaagggttgcagacaagccaagatgcccgattttacgcgctgtccgccagattcgaacccttcagcaacaagggccagacactggtggtacagttcaccgtgaagcatgagcagaatatcgactgtgggggcggctacgtgaagctgtttccgggtggcttggaccagaaggacatgcatggagactcagaatataacatcatgtttggtccggacatctgcggtcctggcaccaagaaggttcatgtcatctttaactacaagggcaagaacgtgctgatcaacaaggatatccggtgtaaggatgatgaattcacacatctatacacgctgattgtgcggccagacaacacctacgaggtgaaaattgacaacagccaggtggagtcgggctccttggaggatgattgggactttctgccgcccaagaagattaaggatcctgacgctgccaagccagaagactgggatgaacgagccaagattgatgaccccacagattccaagcctgaggactgggacaagccagagcacatccctgaccctgatgctaagaagcctgaggactgggacgaagagatggatggagagtgggaaccaccagtgattcaaaatcctgaatacaagggcgaatggaagccacgtcaaattgacaacccagattacaagggtacctggatacacccagagattgacaatcctgaatactcccccgatgcgaatatctatgcctatgatagttttgctgtactgggcttagacctctggcaggtcaagtctggcacaatttttgacaacttcctcatcaccaatgatgaggcctatgcagaggagtttggcaatgagacctggggtgtcaccaaggctgcagagaagcagatgaaggacaagcaggatgaggagcagaggcttaaggaagaagaagaagacaagaagcgtaaagaggaagaggaggccgaggataaagaggatgaggatgacagagatgaagatgaagatgaagaggatgagaaggaagaagatgaggaggatgccactggccaagccaaggatgagctgtagaggccacaccacctgcctccagggctggactgaggcctgaacaccccgccacagagctggctgctcccaataatgtctctatgagactcaagaacttttcatttttttttcaggcaggttcaggtctggggtggattctgatttttgttcccctgcctccccatcctccccacccccctttttttttactggtgtttgtctttaattcttcagccctcacctcctggcctctcatttttgaatcaacattttttctttctgtccctttctccatctcttggtcactatcctccaactctaggaacaggtatggaggaaaagcctaggcttgagatttcatctgctctcctttctgaatctcagaggagggtaggagaagggggtggtatcttccctccccccagcactgaggaagaatggggctcttcccctttctcccttgcccccaggactgggccatttgtggggcagccagttctagcacagctcacactgagagtgtaagaactacaaacaaaatttctattaaattaagttttgtgtcttccca

SEQ ID NO: 717 - DNA, 6849 bp, Rattus norvegicus (Norway rat)
  misc_feature (2293)..(2293): n
ccctcacagtattaagtacccttaccctaccgctttcctcccaactaatcacatagaagtttaggatatacagttcaagagccttcaaagcccttagaaaacaaacaagtttaacttctgataaggactgtaagactatatcttacatctgttaaatgcaaatcaactgctttaattaagctaaatcctcaactagattggaaggattcaaacctacgaaaatttagttaacaactaaataccctacttactggcttcaatctacttctcccgcctatcagaaaagaggcgggagaagccttagtagaggagattctctacaccttccaatttgcaattcgacatgataatcaccttaaggctttttggtaaaaagggggctcaacccctgtctttagatttacagtctaatgcttactcagccattttacctatgttcgtaaacggttgactcttttcaactaaccctaaagatatcggaaccctctacctattatttggagcctgagcaggaatagtagggacagctttaagtattctaattcgagctgaactaggacagctaggcgcactcctaggagatgaccaaatctataatgtcctcgtcacagcccatgcattcgtaataattttctttatagtaatacctataataattggaggcttcggaaactgacttgtaccactaataattggagcccctgatatagcattcccacgaataaataacataagcttttgactgcttcctccatcatttctactccttttagcatcctccatagtagaagctggagctggaacaggatgaacagtatatccccccttagccggaaacctagcccatgctggggtatccgtagatttaactattttttccctccacctagccggggtgtcttctatcttaggagctatcaactttatcaccactatcattaatataaaaccccctgctataacccaatatcagacacctctctttgtatgatccgtactaattacagccgtcctactacttctctcactgccagtattagcagcaggtatcactatactccttacagaccgaaatctaaatactactttcttcgaccccgctggaggcggaggcccaattctttatcaacacctattctgattcttcggccacccagaagtgtacatcttaattcttctagggtttgaaattatttcacatgtagttacctattactctggaaaaaaagaacccttcggatatataggtatggtatgaaccataatatctattggcttcctaggatttattgtatgagcacatcacatattcactgtaggcctggatgtagacacccgagcctactttacatctgccactataattatcgcaattcctacaggcgtaaaagtattcagctgactcgctacactacatggaggaaatatcaaatgatcccccgccatattatgagccttagggtttatcttcttattcacagtagggggcctaacagggatcgtactatctaactcatcccttgacattgtacttcatgatacatactacgtagtagctcacttccactatgtcttatctataggagcagtattcgccatcatagcttgcttcgtccactgattcccactattctcaggctataccctaaatgacacatgagcaaaagccctctttgccattatatttgtaggtgtaaacataacattttttcctcaacacttcctaggattagcagggatacctcgtcgttactctgattatccagatgcttataccacatgaaatacagtctcctctataggctcattcatctcacttacggccgtccttgtaatgatcttcatgatttgagaagccttcgcatcaaaacgagaagtgctctcaatttcctactcttcaactaacctagaatgactgcatggatgccccccaccttaccacacattcgaagaaccttcctatgtaaaagttaaataagaaaggaaggattcgaaccccctacaactggtttcaagccaatttcataaccattatgtctttctcaatgagatattagtaaaataattacataaccttgtcaaggttaagttatagacttaaatctatatatcttacatggcttacccatttcaacttggcttacaagacgccacatcaccaatcatagaagaacttacaaactttcatgaccacaccctaataattgtattcctcatcagctccctagtactttatattatttcactaatactaacaacaaaactaacacacacaagcacaatagacgcccangaagtagaaacaatttgaacaattctcccagctgtcattcttattctaatcgcccttccctccctacgaattctatacataatagacgagattaataacccagttctaacagtaaaaactataggacaccaatgatactgaagctatgaatatactgactatgaagacctatgctttgactcctacataatcccaaccaatgacctaaaactaggtgaacttcgcttattagaagttgataatcgggtagtcttaccaatagaacttccaattcgtatactaatctcatccgaagacgtcctgcactcatgacccatcccttcactagggttaaaaaccgacgcaatccccggccgcctaaaccaagctacagtcacatcaaaccgactaggtctattctatggccaatgctctgaaatttgcggctcaaatcacagcttcatactcattgtactagaaatagtgcctctaaaatatttcgaaaactgatcagcttctataatttaaactcattgcgaagcttagagcgttaaccttttaagttaaagttagagacaacaaatctccacattgacatgccacaactagacacatccacatgatttattacaatcatctcctcaatagccacactatttaatttatttcaattaaaaatttcttcccaaacctttcctgcacctccctcacccaaaactatagccacagaaaaaacgaataacccttgagaatcaaaatgaacgaaaatctatttccctctttcattacccccacaataataggtctaccaattgttgtgaccattattatgttcccatcaattctattcccatcatcagaacgcctaatcagcaaccgactacactcatttcaacactgactaatcaaacttatcatcaaacaaataatgttaattcacacaccaaaaggacgaacctgagccctaataattgtatccctaattatatttatcggctcaaccaaccttctagggcttcttccccatacatttacccctaccactcagctatctataaacctaagcatagccatccccctatgagcaggagccgtaattctaggcttccgacacaaactaaaaaattctttagcccacttcttaccgcaaggaacccccatctcactaattcccatactaatcatcatcgaaactatcagcctatttattcaaccgatagcactagcagtacgactaacagcaaacattacagcaggccatctattaatgcatctaatcggaggagctaccctagtacttatagacatcagcccaccaaccgctacaattacatttattattctacttctacttacagtacttgaatttgtcgtagccttaattcaagcctatgtattcacccttctagtaagcctgtacctacatgataacacataatgacccaccaaacccatgcataccatatagtaaacccaagcccatgaccactaacaggagccctatcagctcttctactcacatccggcttagtaatatgattccattacaactccacaattctcctatcattaggcctcctgacaaacatcctaactatatatcaatgatgacgagatatcatccgtgaaggaacataccaaggccaccacacccctattgtacaaaaaggcctccgatacggaataatcctgtttattgtctccgaagtattcttctttgccggatttttctgagcattttatcattccagcctagttcctacccacgacctaggcggttgctgacccccaacaggaatcacccctttaaatcccctagaagtaccccttctaaatacatcagtcctcttagcatcaggagtctcaattacatgagcccatcacagcctaatagaaggcaaccgaaaccatataaaccaagccctactaatcaccattctcttaggattatatttcactatcttacaagcctcagagtatttcgaaacatcattttctatctcagacggaatttacggctcaacattcttcatagcaacgggatttcatggccttcacgtaattattggctcaactttcctaattgtctgtctactacgacaactaaaattccacttcacatcaaaacatcatttcggatttgaagccgcagcatgatactgacacttcgtagatgtagtttgactattcctatacgtttctatctattgatgaggatcctactcccttagtataaacaatacaactgacttccaatcagttaattctgaaaaaactcagaagagagtaattaacctacccattatcatcacaattaacatcaccttatcttttatcctcatttcaattgcattctgattgcctcaaataaacttatactccgaaaaagcaaacccatatgaatgtggcttcgacccaacaagttctgcacgccttcctttttcaataaaatttttcttagtagccattacatttctactattcgacctagaaatcgccttactacttcccctcccatgagcgattcaaacaaccaataccgctacaataatagcaactgcctttattttagtcactattttagctcttggcctaagctacgaatgaacacaaaaaggactagaatgaacagaataattggtaattagtttaaataaaattaatgatttcgactcattagattatgataataatcataattaccaacaatgacatctgctttcctaaatttaactatagcctttacattatctctactaggtacttttatatttcgctcccacttaatatctactctcctctgcctagaaggaataatactatcactatttgtcataacttcaacatccacattaaactccaactccataatctccataaccatcccaattaccattctagtttttgcagcctgcgaagtagcagtaggtttagccttactagtaaaaatttcaaatacccacggaacagactacgtacaaaacctcaaccttctacaatgttaaaaatcattttcccatctatcatactcctcccactaacatgactctcagccaacaaaaaaatctgaaccaatgtcacctcctacagctttctagtgagcctattaagcttatcactcctatgacaaaatgacgaaaattacctaaatttctcagttatattctcctccgatccattatccaccccactaatcattctaacaacttgactcctcccactaataatgctcgctagccaaaatcacataaaaaaagaaaatataatgcatcaaaaactttacatctcaatacttattagcctccaaattttactcatcataacattctccgcaacagaactaattttattttatatcctgttcgaagccactctaatcccaacactaattatcattacacgatgaggcaaccaaacagaacgcttaaatgcaggaatttatttcctgttttatacactaattggctccatcccactcttaattgccctcatttcaatccaaaactcaataggaacactcaacttcctaatcctctccctcacaacacaccccctaccctcaacatgatccaacaccattctatgactagcatgtataatagcatttataatcaaaataccattatacggagtccatctatgattaccaaaagcccacgtagaagctccaattgcaggctctataattttagcagcaattctcctaaagctagggggttatgggataatacgagtttccatcattctagaccccctaacaaaatctttagcctacccattcatcatcctctcattatgaggcataattataactagctcggtctgcctacgccaaacagatctaaaatcattaattgcttactcatcagtaagccatatagccctagtcatcacagccattataatccagacaccatgaagcttcatgggagctacaatactaataatcgcccacggcttaacctcatcactcttattctgcctagcaaacaccaactacgaacgaattcacagccgaactataattatagctcgaggattacaaataatcttttcattgatagcaacatgatgattattagcaagcttagccaacctagcactaccacccctaattaacctcataggcgagttattcattgttatagcaacattttcctgatcgaacccctctatcatccttatagcaactaacattgtcactacaggaatatactcaatatatatgattatcacaacccaacgaggaaaactaaccagccacataaacaacctccaaccttcccacacacgagaattaacactcatagctctacacattattcccctcatactattaacaatcaaccctaaactcatcacaggcctaacaatatgtagatatagtttacaaaaaacattagactgtgaatctaacaacaggaaatcaaattccttatttaccaagaaagtatgcaagaactgctaattcatgcacccatacctaaaacatatggctttcttacttttataggatagaagtaatccattggtcttaggaaccaaaaaccttggtgcaactccaaataaaagtaata

SEQ ID NO: 718 - DNA, 959 bp, Rattus norvegicus (Norway rat); identical to SEQ ID NO: 698

SEQ ID NO: 719 - DNA, 8351 bp, Rattus norvegicus (Norway rat); identical to SEQ ID NO: 665

SEQ ID NO: 720 - DNA, 8048 bp, Rattus norvegicus (Norway rat); identical to SEQ ID NO: 223
  misc_feature (2005)..(2005): n
  misc_feature (3503)..(3503): n

SEQ ID NO: 721 - DNA, 12728 bp, Rattus norvegicus (Norway rat)
tgttgggaacttctacagtggaagtggagctgtctctgactctttttccagatcttgggacccttttcctcctcttgggtcatctggcctttatatgaggttttgtacccagtcttaatatatatccccaggaggattgctctttgccaaaggaaaacagagaagtgatctggggaagtagggaatggaggactgggaaactttggtcatgatgtgttgtatgagaaaaaaataaatttaaaataaaatgacaactgtccctggtagtctaggagacttaattaatgagcagattacaaaaccacaactgaggtttgaaggacaaagtagtctgcactaatagttcattcagagaacattcaggttagaatactgtgtatggtgtacagcatcattttatatagatgaaagaatcatgagccataaataactcaaaaatctgttacttcatgatccactgccatgttttctagtgcatccaaagatgcatagttacataaaaattataaggcttaaactaacatcttttctgtattatcagttagaggacaatgtgacacaaaaagatttcttcatcgtttaaaactaccaatggtccacaatatctctagaaccataacagaaaagtgaatatgaggctgtaaaaaagaaatactcagtattcttacgtgcatcgacatcttgtgatgcagagagggtggaccagtgcctgcactgcctgaatgaacaaatactcgaaacaaatccaataaaaatcctcatcttttttcttcagaatttggcaaaatgttttcgaaaagcattctccacttactttttcacaaatgagtggggctgttggaggactagtgatacctcttcaggtgcacttgcctagcatgtgcaagaccctgggcttggtccttggcactgaaaatattaacatacacatacagtcagaatatctcaaagttggttaactttatctgctgctacatttttgcctccatggaattttctggctgatttgacatgaaatgggatccagatgctgttctgctctcattttccaaacaggccattagcgctgtggtgccagatcagaagttaagtatttgcagcctagtgccgtctttggtctggaatgagcgataaatagttggtagtgctttgcaaaaacctttcccctacaaacaaacacgtgcaaacatgatctgaatgcatgcccactatgctgaccagtgccagggggaggacagcttcccacccccaggactgacctatgagttggtgaggtattcctgcatgtgctcaccagcactgactggtgccagcaaccagagtattgagaaagcccagcctcattcatgtcaggtcagtagatgcaatttctaagaggtaaaggctccaaggttcagcctttgaaatgatagccaactgcagctaataataaaccagtaccttaggccaagggagaagagtgattattggctgatgagccaccctccttctcaaggatacattataaaatctttgtttctcttcagcaaattcctacaagtttacagtggagccccagtggcaccatggcggttcttggcatcaccattgccttgctggtgtgggtggccaccctcctcgtcatatccatctggaagcagatctataacagttggaacctgcccccaggacctttccctcttcccatccttgggaacatttttcagctggatttgaaggatatccccaagtctttcaccaaggtaaggggaaacattgtttcattaagaaagcaagttaaagattagatataatggatatatattaaactcattgtcatttgttatccaatgacagactaccatgttactgaactaacagttcagttcatcctgggcatggaacactcacagtgaatagtgccatgcaggcccggagccctctgcagttaaagtgactatgagatactgatgttgctggtatcattctgtgccaactgatacaacaacaggtgtaccctggctggtatcaacctgtgccaaagaacagactgaaaaggaaaatactgagctgaccgtgattcaccagaataacagcatctgccttttgctaatgctgtgaacactgtgtgggctaagcagccccaaatgctatcaggcatgggattaatgcttggtgtctttgcacacagcagggtagctacaggtttcaggagcactgagtccaagttagcttgtactgtcagataaggcagagcttaactttagaagcaaacaaaagggtaatgagtgctggcattggctgaataggcacagagaagagaatcgtgtctagatagaaggcaggtcccccgcaacccagcaacttaaggtggaaaaagtatccccctatcagacgagacaaaatgccctttcccccaagtccgtctaactcctgtgaagtacagtacaggagcaatagcaggagacacggtctatctaaagcaggccgagccctgtctatcttctgtgcattggtccctgcagttggcaaagcgcttcgggccagtgttcacactgcaccttggctcaaggcgcatcgtggtcctgcatggctacaaggctgtcaaggaggtgctactgaaccacaagaatgagttttctggacggggggacattcctgtgttccaggagtacaagaacaagggtaagttggcttcttaggacattgggaggtggggcaaactaacagaaagtaatgtaggtaccatttgatcctctgaatcgtagtgacagcaacagagtaaagacagaggcaaaggctcagatgatgggtgagcatgaatgctgttttgaggcttgtaatgggcaagcattgcgaacccagtgacacctccagacccccatggtcaccatatccctgattgacttacagagaatgacagatgggttgtttctgaacaggaagtctcccccggagaattcctcctcaggccctcgtgctttcctacagttcttgggactttccactcagcctcagctatctctgagctgtagctggttccatgcacccaagtcctttcacttacctatccttgcctggcactctacttgtggaacgcaccaggctttaggtgagctagagagagacagagagacagaatgagagagagagagagagacagagacagagacagagacagagacagagagacagacagagagacagagacagagagacagagtgacagagagacagagtgacagagagacagagtgacagagacagagacagagagacaactgttctgccctgaatcttgttcacctgttctcccctgcagatgggaatgtgggctaattttcccatcttcacagctccatcttctactgagtgtgggcacccagaaccagagctactcccagctcgctggtgccacctgtctgcccagcctccgtcttacctgcaccttcttacttcctctttttcactccaggtacccaaagcagatgagaaataaggtgccctgtgattctgcctgaactagcactggtgatacatttctacaaagctttttccttttgtatgagatttcagatcaaagcatggctggctctagatcttattctcagtgtctggcttggcttcccagtttgtgtttccaaaactattttacctcaagcatttgatgtcccctgatcaatagtgtgggtttctgtactatctcggggtggggggaacaaataactagctcagtctttgtcctcaatataggagttactgattgaagagggaccatgcaaggtgacaaggactgctgggaagggcacaaacctttatgtgccctctagtccagctcaggcaatgggccagtgcaatcagggtctgcctcttcacaggctagattcaaaaggcctttgctgctcctgcctggggctccaaagtcatattttcatgctatctacacagaagagggtgcttgtaaaatcagctgggccttaggtaaagatgctttgagtctctagtgtccattgtgtgaatgattgttctaataacgttaagcatgggtgtgcggcaaatgtaccaaaataagtgcacgcatcatttgagcaaatgctgagaaagtgtggttctgacctagaaagtcagcctactgaaaggccccagctctgccactctctcagccactggcctttaactttcaggataaaactgacccacaatgcttagctcatgtcacatatatccctttcccctctcaggctggccatatcttgttctagaaagttctttagaccataataagcatatgtctcctagaacttccacattttctgttgtgtgttccactaggcatctcacatgtgattagactgttaaaatggaagagattatcaaattacaagcaagctctacaccccatgtagttataactcattatagtttgtctccgaatactcagagcctagtaagtgccttagacacagtagataccaaaacattatttattgaagaaaagataggaaacaaggagtagggaggtgttaaagaaagagaaagacccctggagtgtagagaggccagagggttttactaggcaagagttgagagaaactgggcagggctgtccctggataccttgaactggttccaaggggatccaaaagctccaagagacaagttttgaggaatgaaaaaaatgcccacaaaattagctgagctagagataaaaagaaaaattctttttagagttgttgattcccagtgtcctcatgggggtcacaaggctatgttctaggaggaaaaacaatacattatgtttggaaggaaagtacaccgtaacatttcattgagagaaaataatacttggtctttctatcttaatgtctccaaactgggaaatcttctgaccttttgattttagtaaaagatgtagctttgaaaccataaagccttgagttgaagggcttatgttgagaaggttaaaatccatgagcttggatatgctgcttaagatttctatcagtagacaaaaagaggagagtccatttttagagtggctgcctacagttatttagcatggcaagattcagagcaaaggatgaaaccaaaaaaaaaaaaaaaaagttcagaagaaacaagtatgaaacacagcctttcactcccttttcctgtgcttctctgcacctgtacatcccccgcccccgcccccgcccccagtacccaagtgcagcttttaatgctacttcaagggttctttgttaatgtttcttttaatgcctccttttcctacaaacagtaaccagttctcttaacagccagccctcctcccagcttccagccctcctcccagcttccagccctcctcccagcttccagccctcctcccagcttccagccctcctcccagcttccagccctcctcccagcttccagccctcctcccagcttccagccctcctcccagcttccagccatttcaaaggtttttcccaaccattcctccctcaggtccccagcagtccacataaacagtccttctcccaattttcctaattctagcagttccaaactgtaacaactattctagcctatctgctcggctctgctcagcttctcttggctcacctgccgacaactgtctgtcttctcactctgctagcccaattccctctcaactgtcccgtaacagtatcttctctggctcagctcagcttcttctgcaactgtcttctgtttgaactctgatcaatcttttctgcacagacttctcttctttagcccctattggatcttctttctgcaccaactgtcttctctaaccctcatctctgaccatactcttctaccgcctggcccctaatcccttctctcagcctctgctggcatttcatatgctctcctcttcccagaagtccaaaaggcaacaggacattgaaggtcatagggccaagaagttctcttaaaggaccaattgactagcaactagagattctttaaagggccaggcacacaacataaatcaccctacacccaagaccatttcctcctccttccttacttctccaagaattgggtatttatagtatcccatcggtctctttttcttagggattattttcaataatgggcccacatggaaggatgtgcggaggttttccctaagcattctccgagactggggaatggggaaacagggtaatgaggcccgcatccaaagggaggcgcaattcctggtggaggagctcaaaaagaccaaaggttagtatctcagcagtccagaaggattgtgggcaggctgaacactgaacaacacggaggcagttggcagctggggaaggcagaggtcaagttggtcccctggcactgccttctcaatttgagtcccagctcattctaggagagcaaaagtggctgccaggcatgactgctgttcccttagtagccttaaaaagtaaagacacttggaggctcccacattcactgtgtcctcagtgcaaactcaagaagactagaatggctagagaaggccatggtgagatactcacactctacctattttccaggccagccttttgaccccacatttctgattggctgcgcaccctgcaatgtcattgcggatatcctcttcaacaaacgtttcgactacaatgacaagaagtgtctgaggctcatgagtttgttcaatgaaaacttctacctgctgagcaccccctggatccaggtgaccatgcttctcctttgccacacgccttccgtcacgctgttcctgttagagccagagggaaggtcaggttgcctaagagagacaggcctagaaaagcaaactacaggaacacacagtagggcatttgaccaggttggctcagcatcttctcacttcaggactgtgtacacttgactgtacccattcctacacacacgacttggaaagatggcattatccccaaaagatgccattagacccaatattctaagtagtgtggtaaagacaaccataagttcattgtttagaggttcctatcagttacacagttttgttctccttagctttacaataactttgcggattatctacgatacctacctggaagccatagaaaaatcatgaaaaatgtgtctgaaataaaacagtacacacttgaaaaagccaaggaacaccttcagtcactggacatcaactgcgcccgggatgtgactgactgtctcctcatagagatggagaaggtacagaacaggacgggctcgctgggatgggcagagtgcttccaggtcttacattatgacccactctctggtgtccacgctgagcaccgtggttgcatcttgatgaccatggtttttcataaacacacttggcttcagcatgacaccattctcttctctggtcacttttggatggcagagaccctctgttcaacaccttccaggccaagatgaactgcaactctttgggaaatctacccttgtctgagaaaacttgagcatacactttgttatttcttaatcaatcaatgttgcttaaacttccaaagttctaggcacccctgccttcattttcctgcagcctctaagactcttgaatgcctaccccttactttcttgctgtaatggcttgaaaccatgtaaaattctacactgatttcctctagataatctccacttgaggattgctatcagctcagtctctttctgtccctggtccaaaaagcatggccttaagcctgaaaagaggctgagcctagcgcctccagcttagaaggtcattatcattatcagataactctggcacttaccgaggcaagaccctgtggcctggttaagaaaccctttcctgtgctttgcctatttcctggaaaacatcagtttccctcgtcatgaggcagaaagagctgtttcctgatagcacaaggagtctgagaaaatctggttccctccctgatgaagagcaataggcatcactttcttacacctaaagagatcttaccaggtccctgtctgtctccaacttcacaggaaaaacacagccaagaacccatgtacacaatggaaaatgtttctgtgactttggccgacctgttctttgcaggaactgagaccaccagcacaactctgagatatgggctcctgatcctcatgaaatacccagaaattgaaggtacatgaaactcccatgcgtcacagctgagacttgtcagggccactctgtgcaattcaggcctctgtagctctcactaaccttcagggacccagtcactcaatgaaattttttaaaaagcacatgatgttgtatgtgccaggacctagcaccctgaagactggctagtcctgaacacactccactgggatgtttatagcccagtgctgaaatggaaaggggactgagtctatgatctgctctgtaaataatttctgattagaaaataatgttccagttttccctgagaaacatctcctgggtttataggctgagacaggatgcgagccaggccagagtcatcccagagcatcttaaccccagggagctctgaagtgggaattgaaagagaagcaattgaggctgtcctaaatacatttcacttcctcatcaagactttgaaaccaaaatctgggcaggaagaattctgtgcctgaagcaggcatgcaaaagatctaaacacatttaccagatagaggaagtgtgatcacccccacatgtaagtcactggggctcaccttagtagagaaactgagagggctgacagcctaaggtgaaggtgctcaaaggcctgaaaccctaccatcctctgagctgagcttagatctggcagctactgcatacaaagtaatgtttcccaagaacatggttgtgtgtctatctagtccaggaccaagatctgagctctggccttccggtcagcaatgcctttgactttccacaccacataaaaaaagaaaaaaaaaaccaaaaggtgactaaagttcaaggaggaaaatgtacaaattacagtagttagaacttttactactatgctagggaaacataaaatttaaaatgttttaaattattagtataatgaatttctaatatagtcaaggagcaagtaaatgtgacaggcacccatatatcaattaccaaactgaactcctattgacattttgtgatgtttgctttggagctgtttaaaaaataaaccattatacagcgagctggagccccactcactccccagatacagtgatgcttcagggccactatgtagcatcccccatgtgacttagacatttaatgttaactaaatatcaacatataacattattttattttattcatgctttagtattataccataccatacccaacttattgcaacttgcttttttcactccacgtattataagatccatagcaaatcccacagcaacgaccaaggaacttgacaatggttggttgctgtacctctgacatagtcatggtgacttttagatttcagaaactatagtctagtctgccaccctctgcttatttttaacaatagtaaactgtcctagagtaataatgcaaagattccccttagaaatttccaagactcttttatctctactccagctataaagagaattggaaaaacgatcaccaactatgacaacagatgcccaaactgtcaactgtgaataagctcatgggtctcagctttcactgacatttataaggaaatgatttaacaattgaaagtacttggggattacaaacgcagttaagtgctccataaacatacaatgggtggtagatacatgaagaaaaactaggtatgtaggtgaatggagctactggaggatagttggatggatgagtggatgagtgggtgaatgaggatgtaaggatggagaggtactattctggcgggtaaatgaataggtaagtagatggaaaagtgtgtgggttacaggggtagataagtgagcaggtagatggaaatgtatgggtagatggtacgtagacatcaattctggaattaacccttgagattgaccttattcaaatcttggcagagaaacttcatgaagaaattgacagggttattgggccaagccgcgtccctgctgtcagagacagactggatatgccctacatggatgctgtggtgcatgagatccagagattcatcaatcttgtcccttccaacctaccccatgaagcaaccagagatactgtgttccaaggatatgtcatccccaaggtcaggcaagagttggaaagtactccattggcactgttctattggtttatcaccttggttgcccttcaggatagagactcaagggcactgttgaccagcatatattgttagatgtgggaatcaagccagcattcattcttgccctgcagaatgtttcacccaaagtcaccccaataacctcatgaccaaagaaatgaaagaaatggaaagtgtcacctcaactggtccagaggacttgtagaactctctaaaactgagatcccatgaaagcagcaacccagcctgggacccgtcctatcaaagatacagggccttccttttcatttagacctgatctgatccctgtctctttttctaagtcatcctgaaataaacaacactacaaattaaaaatatgctagcctacatatgtagaattccaacagccctgtccgctgagatcccccagataaaagcctgtgtttaacctgactgatagagccctctacttctcctagggtacagttgtgattccaactctggactccctcttatatgacagccatgagtttccagatccagagaagtttaaacctgagcatttcctgaatgaaaatgggaagttcaagtacagtgactatttcaaggcattttctgcaggtaagcagagtctgggagtcacaccttccctgggaaagtgtcttcagtcctaaacttacttcccacgtgctcttccccatcctagatgaggtctaccatcccaactccatcactccttgtaatgtataacccaagtacattcctccctgtttagaaagtcaaatggcacacatctcacaaggaatctaggaaatgagagttctgggtagattatcacagaatggatgtggtttcctaattaatttttcagctatttctactctaaccagatgcagtaaaaagctctcaaaactgtattacctaattcttcataagtttcaacaaaaattgctaaactctattctttatctacctagattcttcttaggaagcatccagacctcctcagatggtcccatcgcagggcctcacctagggttcctgtaaagggagataccatagccagtttgataactttaatggcctgtttacataggcttcacctgtaccatctggatgttttgggtctatttccctaaactaccacttatttatgcagtggagttctcaatgagtggtgtcagtagctggtccctaagtcagtgccactgccattcttgttctctgacatatgatcactggtgttcagggaccaatgggcagggatgatgaatcctactttaaggtggtgtgcctgaagcctcctcccacactccaacacttgatgttatcagtgctagctttgcaagggtccctcagtacctcatcagcactgttgtcccttctaggaaagcgtgtgtgtgttggagaaggcctggcccgcatggaattgtttctgctcctgtctgctattctgcagcattttaacctgaagtctctggttgaccctaaggatatcgacctcagtcctgtcacagttggctttggcagtatcccaccccaatttaaactctgtgtcattccccgttcatgagacctgaaaacttcctgatatcccttccattgttatcccttaaactatgactgtttttaaaaaacccaagcatatagagttcctatcataaaatgaaaccgaaaaaataaataaaaccttgatgaattgtattggttgtggatttaatgagaatcttatccccttgccatgtgaaagttccccagggagtaagatgcatttcacagccagtagtataatcttccaatctatctgtccctgacttctcataatttgtttgcatatgcacagatgaccctggctatctgcccatcacaagacactgaattaacaatatattcaaagttcttttaccatacagtatcatattcataggctcttgggattataatgtgagcagttttatgctgaccctactttccagctcatctaccttggggtactactgaaacccaaagctaacagacaccacaacagtggcctcactgaaggcgtttggatcatcatagctccacaatggcaagattgcttccaggggaaaaaaatgtaattttaaaatttgctttggggcagagatgtttcaacttcatagattaccattagcaaaattctcaagtgacaagggaaagataggatgtatgtagctctaggagccattaactaattgtggtattatctggctactgtctaaggttgacacctggtcagcagagtcaccaattatcttctctcagtggtaaagcttgagatggttcaaggaagggtcattaacgtcacaaatacagttccaaaaaggcatgcttgcacatatctttaaacccagcactcaggagacataggcagacagatagatctctgagagtctaaggccagcctggtctacttagaaaattccaaaccagacagaactaaaaaaatgagactctgtctcaaaacaaagagacaaataacaggagtagagttccttagaagaattc

SEQ ID NO: 722 - DNA, 19080 bp, Rattus norvegicus (Norway rat)
  misc_feature (6102)..(6102): n
  misc_feature (6103)..(6103): n
  misc_feature (6320)..(6320): n
  misc_feature (6321)..(6321): n
  misc_feature (6322)..(6322): n
  misc_feature (6323)..(6323): n
  misc_feature (6834)..(6834): n
  misc_feature (6840)..(6840): n
  misc_feature (6843)..(6843): n
  misc_feature (6844)..(6844): n
  misc_feature (6846)..(6846): n
tcaacggatctcactcttgactgtccagtgccagcaccttagcaaactcccccagcttggaggcagtggcccaccacatcatggaggtgtcgtctgagcacaggttccggaagactgtcaaagtctgccttaataggcaggggtactcaggggtagcaaactgagaagagaccacaggccaaggtgtgggaggtgaaccagtctctacccaccagccacttcatcagaggcaccaagtgagcctctaaaacggaaggtgggtgctcatgtgagatgccccacacggactttactactgtctcttccactgtggccagtgactcaagaggtggcagcagacagtgtcacatactcaggacctcccaccaaagtgtgaggctcccagctattcagccaaggccaagaggaccttggtgtcacagatggcatctgtaaggaagggcaggagctaacttctggttcattcaatgacaaaggcaaaggccatggtggagagcatcttgatacagttgagacagagctgagtgtcctcatcacacagttcatctatgagcaccatggtggggtagagcgaatcgttgccgttgacagctgctgtcttggctccttggcatttctttttaaaaagaagagaaaaaggtcagcagtctgttttacttatgtttgtttgtaaatacacacactgtactagaagcatgaaattcagaaagaagctgacagtaagatggatagggaggttggttactgactgtgtattcaccttaaatctctgagggaatgtggagccagcaatgactgtgtgtttgtgtctccaagcctagcccacaggttagcttacattggtgtgaggaacacagtattgtataacaccatacaaaagtgagcagagacagggcccatgaaatcacaagtagaaagtgtttgttactgttccacctggtcacccaaccaggtgtcctgtgtgtctaaaagccacacagaaagacaaaatggagtatgtttggggtggggcgaagagagtgaggtattggcagcccacgtgcgaaggggattgaaggaaacatgggtaagattggatacaagttgggttttcagctgtttgaagaattggcttgtagaggaaaggacactatattgtgcactgtcttaggaataagacacaggaggccgttgtatggaggaaaatgcaggggcttcacgagagtgagcaaagacctgctagaggtcttctgagtccccatgctctctgtgtgtttatatatgcatatacatagcatattaatgtattaataaattacatatataataagacaagatatattatgtatatgtggtgtttgaatatgcttggaccagggagtggcactatcaggaagtgtgaccttgttggaagaaatgtgtcactggttgtgaactttgagaccctcctcctagctgtctggaagacagtcttctcctggctaccttggatcaagatgtagagctctcagctccttctccagcaccaggtcttcctggatgctgccatgctcctcccttgatggtaatggactgaacctttgaacctgtaagccagccccaattaaatggtgtcctttgtaagagttgccttggtcatggtgtctcttcccagcaataagaccctaagtaagacagaatatattaactatttatctattcagatgctgtgacaggttaaaccattctctctgatagggagaactcagctattggtaattttagtataatttaattgaattttttagacaggatcttacatatctcaagccggcttcaaactcttatatagccaaagatgatcttgacatctggattctcttgcctttgccccctgagacctgggtttcagcatgcgccatcacaactggagtatgtggttctgggaattgtaccaagatcctcatgcagccttaggtaagcctaccaactaagctttgtccctgggcctcattggtaatatttagaattaccaagtagttcttttggttagccattgactggttctacagaaatcacagctgtgaagtaataattggggtcagggtgattgtagaagaaatcttgatttgaagccgattcttttggccaattgtcttggggctcattagcttacattcatagataaaggctgtgataaaggctgtgactgggaagtttcgaaatgaaattcagaaagcgtggcccgtctgcagcatgaggaaagctaaagatggcttaaggaacatcatctttctccaggcacgtgctaagcagtctaggactgagtagccactgtcctttctcctgggaaatcccagatgggaaggatcaacccacaaagcatttctggcctcacggatgcccaagaaaaggtgctaaggaaactttctcaacccttggcagattcaaccacttatgattttattagccatggcttcgtcatgtggttgacttgatgtacccttaaagaagtgctgcctagagactggttcttagtgtgggtcacgggactctgctcatgcccacttctactttcttttcttggtaactgaagctgcctggtcgcatgctgagctcactgagccggctaatggcagggctgtaggatgtgcaggaagggcaccaggtagacagtcagatgcaaagacatttgggcagccagagatgctgagcaaagcttaaagagaaaaaatagatcaccacaaagctctttgtctcactccagccctcttccccacgaccacagagggaagaagccaagcctgagtcctccgtcacagctgcacatgtcccgtgactcagcacctcgctcgaggctaatgtggagtctttagggtaaggaagtgggtggtcctagtctgctctgcatggtcaggtcactcactcggcattgataaactcagagctgggtttggggatttcaagagcggcaaggtcagaaggtcaaagcctggaagagtccgcagatgaagataagcaaggagcttccggttccaggtctccaggggaagccgactgaggcttcaaccataagatggacttcgggagatataactagtatttctttgtgtggttctgaggacagaattgagctcagggtcagcccttacagagcagggagctccatcaaaaatggctttcctaaagaatgaattgcttgcaagggaggtagccagttctcaggttgggagcatccaaaaataaaagcaggaaaacctggcggggaccctgagagacaagtaggaagaggatcttgggtgaagggcagagtggtggccttctgcagtttccctagaatactgaaatcctagggcttgagagatgaggtagttggtaagacagaagcatgaggatctgaattggatccctggtacctgtgtacaacatggcccatactcataaaccagagctgggagggtagagttgggatcctacagattgttgggcagctggtgagttccataccagtaagcgagcctgcctaaggtacaaacagttggatggtgtaacatctgaggtcatcctgtggtctcacacatgcacgtgtatgcatttgcgcgcgcgcgcgcgcacgcacgcacacacacacacacaaatcaagaagtgcattcaagatttgtgtcagtttgcttaaagctgaattcccaagcttacaaggtttgggaacaggagaaaagtgaccacttgtaattgtgtcggggacatccttatctccctctccccagatctccctctgctaaggcatatctccctgcctgattaccaaaggacgacttttatagacactgctattgtaccctgtccctactacacacaacgggagggagctgctgatcaaaaaaagttacaaggacatcagtgtccatggaaaatgtagctgttactgataattctttctttttatttttctttataaagaaaacaaagagaagtttcggggggaggggcattcctccaagtttctgttgactctgcttttctggttagttatcttcccaaacttggcactgaaccagattaggctaaagaaagtcttagagagggctcatttcagattcatctgccccagactgaagaaactaaggccagagggcagagtggtttgtctaaaggcactggatgcctcggggcacagctgggactgaagccagccttagcccacttctgaccaagcctagacatttccagtaggctgccttttgggaaaggaccaaatcaccatagcctctgggccttggacaaatggaaatctggcctcatggctgttcctttaaagatgtgagagggaagctcggccctcgaccacacgtttctccttcaagccagttttcttttatttacatcgttttcaaggtctgccgcccaaactgcgcgctgcctacatgggttcctcgctattgcctgactcttgatacacaaatgttccagggtccagagtgggaagcttggcttctcccccaagaagtagcatggtggggggcttctaggttgtttctcctttccagagatgcctgtaacagatgtttctgctcttagccaaaagcagctaggaatcctcttagcacctctggacacagctacttaatcagcagggctccatggagaacttccactatagcttcttgttcaggaaccaatgtgaaggccaagtgtgagacaagtagtttttgtctaaaaatttgtattattatatattaattatacacaatgagtatatatatatatatgtgtgtgtgtgtgtatatatattcagcctccccccccatttccctttctcctcccataatctcttctctctgttcctctcatgaatttctttagggttgctcacaggagcatggagaggagggttattcacaggaacatggacacttaccagggactatactactgaagacagttgggtagtgtacttgaaaataggtgtgaggttcctaggtccagtgccagtgaagcccaccctgcctgactgggttccaagtgggtaagaaccatgtttaggttttatgcatctcagagacaggggaggccttctacgttatctcattcttttttttttttttttttttttttggttctttttttcggagctggggaccgaacccagggccttgtgcttcctaggtaagcgctctaccactgaactaaatccccagccccggttatctcattcttaacccgtttctgattccttcatctgtctgccaagggaccggcagcccagtgcagcatttagggagccaggtacttcatgtatgctcttccctagcaagatgcctgtaccatcttcagtttcttttactcttccattaaaataggaacaaagaaaaggagtgcagtaatgggttaatgtgaaagatgaacgtgggcgtcgggcggtgaaatcctgaacctgtttggggctaggagcggtccagagtagagtgtggattcctcttcccttaaggctcttctgttggggcctgctgagcccttaggtacctagcagagaatagaacagccatcaatctagctaggggccctcaggcaaccagcgcggtcatttgtgatgcccctgcgccccctggtgcccccgctgggctgtgcgcctctcgtcccctcccgacccccccaccaggcttccagaaagctcctagtgcattccccggcattctctggcgtgagtcacgcaggtttgcagccagccaaagggggtgtacttgagcagagcgctataaatagggcgcttccccggtgctcaccacccgcgtcaccaggaggagcgcactggagccaagccgcagacgggtgagacagctgcaccttttctaccccaacaccgaaggcacaccggcagggatgggagggcaagggtaggagccaggtagagagctgccgtgggtaagtgggaggtgctagagccccatcaccaggcagtcgagcttggggtagggggtgcacgctggctcagattcaggagccacccccccgcccctgttctttaacccgcatcacaattccaaggctgttcaataggccacatgcaaagatcttccttttgcaaaaatggggaaactgagacgtgaagcctgcagtgagatgcggatcgcgagggcgctagtnntgaacgccgcgagtaggtgcggatctctgtagtggctgttgtcttaccggcatgagtcattgcatttggaccttccctccagctcctgggacagcgcataataaataagatgttgtgtatttaaaaggacgtgctgcagccatcgagacctgctttactgaacagaatgcatgcattcagttctttagagaaatgcttccccaggcctgagatgtcnnnnctaccggatcattttatagatggtaatctgaggactggagacgataagaggttcagcctccaaacgttctatgaatgagaaactgaagccctttggctttccagaatttctagacccagttttaaaaaacggtgctggtgctgtttttaaaggacaaagttaggaattcaagagttcatacaagttctctaacaggaaggtcttgggacaataccatttagtgcctgaccttgtgagaataagaaaacaaaccacaaatggtagttggtggaatattaggcagcagcaaatgtgtgactttaaaaatatttgaaaacaggacctatgatggcattgtttataaaaatgcattgaaagaaaaggagaaaatatgccacaatggaagagactgtgttttcttactagataaggtggtccttgcgctggtggggctgttgtaccagggtagttggcagccaggcagtaggccagcctccaaatgatgacaggaagtgagtcagtgtagaggaanaggcangcnngntgagctgtgttgtcctcggaccaacagcaccacagcacctagaagcttgggagacaaacagattctgaccagagacagtattactggcagacctcaggggagtctattcttagatttacagaatagaggatcgcttctttgagatatcaggcccattttacagataaagaaacagaagctgtgagacttttgttgtcaaggaaataacctgggaggcgaatgacttttgttgtcaaagaaagaatattaaaatgaggttttggagggctgcattctttcctggggtgaccactggcttgcagtgtgtcttgagaagcccaacaggtgtcttagaagtgctgaggctgtctctctagaccccaggctccttacagctcatcttgctactgcttcccctcccattcagtgaccttccttgctgcctgcttcctcttctgggcattgtactgtcctcacatcagaagttatttccaaggcagttaaatggtttttccaaaaatggtcacacttaaggcctctcccacctacagatatctctgtggctttgtctctgatgtggcaaggggtctgtccctgcctggggcatttcaggcctcagtgagcacctgggaggtctatgagatcagggccatcctggtggatcatgaaccagggcgccagccacccaccatctctgggaaagtgcttgtctcttctcccacaccactcctctgctctgtgtgcataattatgcctcaggaaagccttgcctattaatgatctgcccagtgtcctgatgggcctgcctagctgggagcaggttttaagagcaaggcatttcaggaagacagatcgctcccctttccctgttcttgtggctgtaggaagctggtgagcccagataagccattctgggcagggttagagatgcaagatgggtgtgtgtgtgtgbtgtgtgtgtgtgtgtgtgtctctttatgcaaccaatccagcttctgggaaaggatccattgtgtaatactgggcttcggcctgtgtccctggctcaggcagccggcccagtggtggctggggcaccttggcagagcatgctagttcaggcttagagggagcaggcatgtgaaagggatttgctggagccaatgggcttgtcctcctgaaggggctttcctgggggctcactgctaatctctggctttgtccttcccttttctagtgctgccttctctacagtcctaaacagtccctcccttccctttttgattttacccaactcccctccccagtccatactcagcctggcacaagcttcacccagagatggtgcattgggttgaatttcctgtgctgatggaagggcgtgcatattaccacggactcctgaaaagcacacttagacagcctcgggaggctgtaccgtaaggggagcccaggactgtgttgtgagtgaggttcagtcccatggaagggattggcgccagccacccaccatctctgggaaagtgcttgtctcttctcccacaccactcctctgctctgtgtgcataattatgcctcaggaaagccttgcctattctgcctcggggatttatgggaagaaaggactctgcttggagcttgtcccttccaactccagatagcctgggtcctctgtgcggctgaaccatggttcttcccagggccccactgcttccattgtcttttgaaggcatgaatttaatcttgtttttgtccccacgttcttcagaagtaaactgcagtgatgccagatggggaaacagatgagggccatgagttccaatcccatcccacctcccctctcaggagcagaaaacccctaagctgcccagaggttaccatgacattctgctgttctttgcaggactccagactccaaagaggccacaccatgaagattctcctgctgtgtgtggcactgctgctgacctgggacaatggcatggtcctgggagagcaggagttctctgacaatgagctccaaggtagactaaactgctgtccctctggtgggtctggcagagccacccctcaaagttcagtccctaagtgctgagggctgtttgcatactgcacctgggactgtccatgtcctctgcactctcagagtctctaagctctagctcttgccttggtgtttttgtggtcagatgccttctagacattggcctctgtctcaagcttctctgttggctgcatgccatacctttgtttcctctaggtccccttacctggctctcctattcttctctcaaagctgtgtccggaccctttgaaagtttgtcagtctcccctttgtgtgacaaccagagttcttaccaatgtgtctccaagctgatttccccctggaaaccttgctctaccagtttccttctctggaaaagggcagcacagttcaacatgaagtagtcaactgagagcgttctctcccttcctccccatcttctaatgcttttctggaaacccgcctttccttccctccttctctcctaatctccgctcatagctgaccagttctgtgagaatttcattaaaaataatatgatctgactctctgatatggatatgcttggtgaaatgactgctgtggtcaagcgcttagctgcccatcacctcaacttattgttgggttcagacacgtgagatgcattattcacttagtgcacgtttttttttttttttttttggagctgggaccgaacccagggccttgctgtgctaggcaaggttctaccactgagctaaatccccaacccgacttagcgcacttcaagggtagaacacattgatcaaccacgagctctgcttggaccgtggaccttcaggcttagtcatgcattgagactcttgcccttgctcggcagccccccccgcccccatgcccttctgtttggaagtgtttggcagtggcatcaggtagaacacagcagaggtgtgggaaatggcacttgacacaggataagtaagtggtaccccgtgacataatgtgtcactgccttgtcaccagggctgagtcttggttacggtctctatggtgaatgcagctcttcatttatctccccgtctccatggtgtttggtgccaagtcactcatcttccggtcaccatcacctgacactgtgcattgcagcaaagaagtgccaagactgggttaacctgaatgtcacaaagatcgtgtccaaaatggcacttttattatattttgatgcttaggttaactatcttttttttctgtatttccttgaaatatcctctgtggctgttggctccccagggtggcatggtggggtcagtcatacatagtatggctgccctctttgcaccactcctgtgcttctgagctgtgacgcagggtctaccatggaccctttgatgagaccaagggacaggactgaggccacaggactgccacaggctgggggtagtagtgacagcatctcacgttgacagcctccagcactcccatcagagcatggctttctcaccgtcccgccggcttccaggctatttctccagccatttcttcccttctcaactcactgtaccttcctgtctctcacagaactgtccactcaaggaagtaggtatgttaataaggagattcagaacgccgtccagggggtgaagcacataaagaccctcatagaaaaaaccaacgcagagcgcaagtccctgctcaacagtttagaggaagccaagaagaagaaagaggtaggcccagccttgactgagccctggctctccctgctggaacacggtggcaggtgccttgctgggttgccatgtgtcctggtgcagtctttgcagggctttgctaatactgggccagactaaggagccaggaaaagcacattcgcttgtggagcctcagggctgaggtcttggatctggtttccttgcaagtctgcccaggcctgaagccaagattcatttcaataggtttttctaacccttgctgtgtgcagggcatggtgcaggactcgggagaggggtcatggcagcacctggccacttcccaccactcttttcttctgtattcaaagtggctcttaacatgaatgtgcttatttttaacatgaatggcaatattttaaagttaacgtaaaatcctcatgatctatccttagacatccattcatccccactcagcttcgggtgtggggttggggaccgttttcaaagcccttagcagaggctgaggttatgggtagaaccaggccctctatagattgtccctacctgtgataatgcttactttataaattacagacagtagggtaggagcagcaacgatgacgtagaatagttacaatgttacaccaaacaaaaggttatgcagatgcaatttctcccactctcagaatatctcagttcctcagcctcagcaacactatttttagactgtggttgaccatgggtagctgagaactgataacaggggactgccctgttaccatttgtttaacttgccttttctacatgtggacgtctatgttgaccctggtacacacacacacacacacacacacacacacacacacacacacacacacgaacacacatactagaacttatacacagatccatccactcatttattttccatatctttatgtagacgtacacatttgctgtaaactaatatctcttcaggtggagaatttaaattttttattttggtgatccctggagccaataattgggtcagggggcatggtaatgaggttgtggtcgatttgacttcaggttggatagctttgatttgcacatcaggggccacggttctaatagaaagagaagactggcctctttggggagatgagaagagacagtgaggtggcataagggagagatgggtcctgaagaagagacagtcagagcagcaaatcagagcggacagggaaaacttagagaacagctgggccttgaaggatgagaggcccctgtgagcggtgtggggacgccatgacggatgggctagagcaaagctgtgggctgagtagcaccttgtacacagatgggagagatcggctgggtctctgtgtgggtcacctcaccttgtcatctccatgaagggtgctctagatgacaccagggattctgaaatgaagctgaaggctttcccggaagtgtgtaacgagaccatgatggccctctgggaagagtgtaagccctgcctgaagcacacctgcatgaagttctacgcacgcgtctgcaggagcggctcggggctggttggtcgccaggtgagaaggagacatgtccatggcctgggttctggatggggagtgtggagaatccacgaaataggcctcactccatatactgggtacagttgattagcgttgcttgactgcatgcctttctagtgtcgtggtcgattggtgatgtctgacacgagtacacatgtagccaatcatcatgggtatgcatgacagtcttacaagacctttaaccagctgggtaaaatggcctcatggtatggtagaaccccatgctcatataggaaaggggggctaagaatatttagtatatttgcatcaattctatccctacctgtgagcttcactggttgggactcagtgaaactcactgtttcctgaaggctgagcagccaagtgggagccgctgtccttcatgaccaaagatgagccctctgagtttcaccgtgagaggtggctgcagggcctgacagggtattcaggaggcagaacagcgggaacttgggtgagctgctgtgtggtcacagggtgaggcaggctggggtgcacaaggccttactgtacttctctgggtcccagctagaggagtttctgaaccagagctcacccttctacttctggatgaacggggaccgcatcgactccctgctggagagtgaccggcagcagagccaagtcctagatgctatgcaggacagcttcactcgggcgtctggcatcatagatacgcttttccaggaccggttcttcacccatgagccccaggacatccaccatttctcccccatgggcttcccacacaagcggcctcatttcttgtaccccaagtcccgcttggtccgcagcctcatgcctctctcccactacgggcctctgagcttccacaacatgttccagcctttctttgatatgatacaccaggctcaacaggccatggacgtccagctccatagcccagctttacagttcccggatgtggatttcttaaaaggtcagaaagcattcgttgtctttccaagacggaatgggagtctccaagatgtttaggctctgctagggcttgacatgtgttttatgttcccagcagcccctgaggctggtattttcccccatttgcagggtaaaggagcatggatgggggtaaagcaatgcagaaggcaaactgggacccagttcaatctcacacttgtagagcttggagcctgtgttctttacagccagctcagggtgtgatccagctgtacctcctctaggaccctggcttttctttcttgggaacttttgaggatgtggtgttggaggcctgcctttccaggcaacaggtctgcgtcatcttaaagaagatggtcatgactgcggcctaagcatgtaacacctgtaagatgaaatgtgatgtggacacgagaaacccgtgtctgaggagtgattttcttcatcagtgtgtgtcctaatgccgtgtccttcacgtatggtttgcacgagaaacataggaaggcctggcacccaattcacgtctcttgtagctctgttatctaaggatggtgtatgttgtcaggacacacttgtgctttctggggcttgatggccagttagggagtaccgccagccaaggagaatgaagaacagccacgatgccagaaggcacacagctgagggaatgtgtgagatctctcagagggagatggtgagaaggcaggcagtacctcgtaagagccatgggaatatggctagggagccccagggaaatcgcatgtctgcaagcgaacgactaagcttcgtcttgcctgaccacagcgctgagcagaggtgtggggactcgggggtgggtgtctttccaatgtgacacgtgcctcattctgcgcccctttctcctcatgtgtccagaaggtgaagatgacccgacagtgtgcaaggagatccgccataactccacaggatgcctgaagatgaagggccagtgtgagaagtgccaagagatcttgtctgtgggtgagtcgggaaccagtctataatctgggcatctgactaagggtcaccagtgactaactggtactgtccttcagagactagttctctgcctgtgatctgtagtccctgggagactcctccctggtgcatagcttactatgctcatacctacagcttcgttatttgggagctggggtagaacccgtgcctcatgcatgctgggtgagtgctctaccgttgagccacgccaattttacttagaatcaaatccaggggcagatttttctcaagtagatgaggtctgtctaaagcacccacacaccctggtggctcatggcaaacctgcaacccgcggtggatatctccatagaatttaaccgtagccaccagcaatctgcagctcattcccctggttgctttgttccacagtgccaagtacagtagaccctgctttttaactttagattatgaaatctttgacagcatgcattttgtttaatcagtgttccacatgcctggcactgttgcgaacatgtcacaggtgtttgttctcagaatgatcttgtgagcctggttcagctttctttacattttgcagaatggctacatgacttatctaagattacatgacatgagacatctcacttaggctgtgctcaggaacagcctgctggggtttctccctgggaaccctgagctatgtccttgcgatggtggtccttgatatcctggccacattccttttggttgattagtccctcagaaaggaactgttttccttcatcggcttcccaggcagtctgggtatggcggcggcacatccctatagtaccaacatctgggaggctgaggaaggagggtggtgaatctgaggccagtcttggctgcatagcaaggttctgtctcagtgaaaacaaagtacagcaaacccagaaccgttccccacagatttgtcaggtctggcggtcaatcaaatgtttctgctttcagtccggtcttcacagtggctcacggtatacagcgcttcctgctcagatcacaaggagttaatcgtcctctttgttgttttgtcatatgtgtagttggcagggacagacgttcagagtctggttaaatattcccagcctcactcctgcaatgttaggagcccaggaaagatacattactgctttcaaaggttatagtgtgaaattataaacaaatatgtacccacaccagcaggccgacccccaggaaaccgtcagggatctcttccatcaggcttagtgaccctctcaacagtcaccgtttctgtcacctgctagctcctgtgtacggtgcttacaatgacagggaggctccacagggacctctcatctgggacaacttgactcagcctgcgggtggacccgaacatggctgagcatttaacgtttttggcttctacctgccatgtgccaagtgacaatcagaaatatcttcagaacgtgtggaatgtccctggtgggtagtgtggtcccaggttgagaaccacagttctacaccactggtcccctccaggactcttccttgtttgggctaagagtaagggtactcaggctattcctcaaagatttcttctcatctgtgctgcttgtctttaatcctctttcttgccccatgcaacattttatcttatttagtatgaatgattgcagctgtcacgtggggcacagaggctcccttgtcttgcttagttttgatacacagactctcctagatgttttaaaaatagtagaggagggggttttcagaaaaaatggttttcagaaaacatgggcattttgtaggacccagatgcctgatacctgcaatgtactcatggaccagagggaagacaccagttttcctgttttctgtaggagccttcctggccagctgtgggtggacaagggcaggcaaggaccgaccctcagcaccggatgcctgtgttttgtagcctaggaacctggctgtctcttctgcagcttgggttctgggaaaatggtattgtggaaatttctcaaatatgttccaaaataagcttggagaatgttctagaaccatggtctcaggggaggaagagctcaggttgaggagctgaagatgcgggttcagtcctggttccagagattgcttcccctctagatctgggcaagttccttacttccaaaaccctgtttcatgactggtaaatcaggagtgttgatgcttgtgtcaagcccagcatactttgaggcacacagtaggtccacctaagggaataatgctcctcttctctgtggagtgtccagtgcaacagtagcttccttctacttggaaatgagctaagtggggagctaagggaatgagaataactccaggtctgagaacatggagtagttggtgtcagtactctccagaacatggtcagtggcattgtgacaggtcatcgagattggtcatgcctaccacccagagaggattcaaccacactgctccaacacagcctagcatgggcactattgcctcccaaagcgtgaagggagcagccccttgatttccatgtcagggggactgttctgtgggaactgtaagaactggtttgtagacttccattgaagagctcctctgcttcagatcccagagctggagccatcccccttaacatctctctcatgcttctgccttctgcttctttcttccctggccagactgttcgaccaacaatcctgcccaggctaacctgcgccaggagctaaacgactcgctccaggtggctgagaggctgacccagcagtacaacgagctgcttcattccctccagtccaagatgctcaacacctcatccctgctggaacagctgaacgaccagttcacgtgggtgtcccagctggctaacctcacacagggcgatgaccagtaccttcgggtctccacagtgagtagtatcccagttatttgatgagctaaggcccacgtgtgatccagaggtgatggatgcctcttagaggtgccgtgggacaaaggtttacaccatcaggaactgggaaaaccatactcgcgttgtagcattgaaatgccttcacccctcgaggtcagatatccaagtcttatttccaagatgaggaaagagagaggttctgtggcttgctaagtagacggaactttgggcagcttccctgagtcagcctgtcagctgctgctttctgcccagggccatgctgagtgccgcatgaattagtgttagccagtgagatcggcttcctttagtgctcacagcccccctcgtcctctttccaccatagactggctagcatttgtacaaagcaaatgttggggtcaggtgttgtggtgagtgtctgtaagccggcaccaaagaaactgaggcaggaaagtggagatcttgagcccgggctggactatacagtgaaggcctctctcaaacaaggcaaaacaagaagaaaacatttgacaatcatttcaagtttctggggtgcctacttggctagtcagttttcaaataacatctgtcccttcaaatcgagatagttttgctcagaattctctgaacatcttgagtagcaacaggtaacctggagctccatactcggttgcaggggcaaagagaagggcacgctctgtagacattgtgcagagacacttctcctgccttcttctaggtgacaacccattcttctgactcagaagtcccctctcgtgtcactgaggtggtggtgaagctgtttgactctgaccccatcacagtggtgttaccagaagaagtctccaaggataaccctaagtttatggacacagtggcagagaaagcgctacaggaataccgcaggaaaagccggtaagcgggcagcctttctgtgaccctgagggctgataaacaagtctttctaaacaagaccctggaggactggaaagtccgaaggagcccagagaaggagcaaaatatgcattctggatgcagggcctatccctgaggccagaccccacgggtgagctaggaaaacccctggggattttattttctttgctctgggaaatatttttcctcagtggcaaggatgtgggtgttggtggctgcttcttggggggatattgattctcttctctactctccttttttttccagcatggaatgagacagaagcatcagttttctatatgtaggagtctcaaggagggaatctcccagctttccgaggttgctgcagacccctagagaactccacatgtctccagcgcctaggcctccaccccagcagcctctccttcctctgggttctgtactctaatgcctgcacttgatgctctcgggaagaactgcttcccccacgcaactaatccaataaagccaccttgcgtatagtgtgccttgggcccgctttcatattttcatacttgattctcctgcaggccgcacatcttcatttgatatggagagaaaacaaggaagtagctgggtcagttcgtaaagcacttgccacatagacatgagtttggtaaagtcaggcatggtggcaccctcttgtaacttaatctcggcacctcagcgctctcagagcagagggtccctggagctggtgggtggtcggtgagcgtcaggccccagtgagagatcttgtctcagaacacaggtatgaggagaccaaagaatgacacaaggccacacatgtagaagaaatctcgaagttaacagctgagactgtgtaagagtctccatatactggagagtaaagagtactcatgacaactggggggacctctggctttgggggagaggtttgttccaataagctgctgaggcaagttcctgaagccagaaacttttccctcccaccacaacactgtccacgagttctgacaaagtggggcagtctcccagagaatgcactgaaattaaggcaggaagagctgctagtgggacacatgggttaatgtgtaactgacaatttcctgtggaaactgctcagcagaagccaaatgaagaggcagttttcttgttgtttgtaagaacatgggaacctgggaccacttccggaccatggcgtctccc

SEQ ID NO: 723 - DNA, 602 bp, Rattus sp.; identical to SEQ ID NO: 683
  misc_feature (564)..(564): n

SEQ ID NO: 724 - DNA, 386 bp, Rattus norvegicus (Norway rat)
ttttttttttttttggtgaaagattttttttttttttttattggtaatggggtctttaagtagtctgaaactaacactcaagaaatctttgctagttaggatctattgccaggaaacattctcagaccttcttatgtatgagattaaggtcaacattcgttggtgagcggagatcactgtgataggcaccttacaatatggcaaagggctgaaatgatggcctcactttccatgatgtgggtgtagccagcttgtcacaggtcacaacaaagagctctgtggaacaccgttccaatcagcagttttcctttgtacacagcggcgactgtcgtaccttgcaacaccgtgccattctctgaataaactacagttacttcctcgtgccg

SEQ ID NO: 725 - DNA, 445 bp, Rattus sp.
actttacaagccagatatattttaaaaagatcatgtttacaataggtaaattacgtagtgaagaaatgtcaaaatgaagttgagtaacaaaggcacatttgaaagtttaagagtacaaagagtcccatgtttgttctccgagcataggaggaaagggagacagatatattacaattacattctcagggggagggtttctgtcagtggaagtgattaacactggcttcttttctcccctctctggggcagtcttttccttccttggcttcggacagacaggttaaccttctgccatgtagaggcgatacatcagagctaccaccatggctgagatggctgggatcacccagttggtccaccaactggaattagactcgacagtagtgataagggtttctgtactttgccaagacagcttgggaatttggcttctgacagactccca

SEQ ID NO: 726 - DNA, 552 bp, Rattus sp.
gaatgaaataaaggtggtttaataagaacgtttcacggcatcttcccgagttgctaacacggtttatagagcaagaacactgtttcagtacaaatgggaagctactgctttggcaagatcctggtcctcctgggctgggtccctcagttctgggggttactgacgacagcagtggtgctgtaggagtacgggctgagcagggctgcgatggtgtagtggcgatgaccagagtcattggctgtgaaaaccacctctgcgtattcatggaatggggaaatgccaagagccttccagtacgatttggtgtccagttctaccctgtacaccccttccgtgaacttctcatctgtggtgagcccgtgcagctctccagactcggcggtcttcccagaggcaaacggctcccagcttccgtctgcagtctttttgaacactttcacggccacatcaacagcagggctgcctcggacagcatccaggactttgaccatcagaggacacttggattctccagcacccccagggccagcttcagacgcaaatatcagtcca

SEQ ID NO: 727 - DNA, 479 bp, Rattus sp.
gaagagcacaagtatttttatttctttcttttttttttcttttttttcctttttttcggagctggggaccaaacccagggccttgcgcttgctaggcaagcgctctaccactgagctaaatccccaaccccttttttatttctttaacaatgcaaaatatacacgttgacttgactaggacatattcacatgtaaattttttctcatatccacaactctggatagatcagaggaatgacaaagatcatcacaggaagcagactgtagtatctccaaagtttattccagtccatttcttcttttatactccaaaacatcttcgttgtgttggtggatgagataaatccacatgaaaatcgaggtgcccaaggtcagcccaactttcacccagttaggtttggcattgactggctcccggacatagaactttgaccgtgttgaagagcatctcggcagcctggcgggggccagcagccgga

SEQ ID NO: 728 - DNA, 377 bp, Rattus sp.
gcgcaagttaggttttgtcaaagaaagggtgtaaaacgcagctcagtaacagtccgcctagaagcatttgcggtgcacgatggaggggccggactcatcgtactcctgcttgctgatccacatctgctggaaggtggacagtgaggccaggatagagccaccaatccacacagagtacttgcgctcaggaggagcaatgatcttgatcttcatggtgctaggagccagggcagtaatctccttctgcatcctgtcagcaatgcctgggtacatggtggtgccaccagacagcactgtgttggcatagaggtctttacggatgtcaacgtcacacttcatgatggaattgaatgtagtttcatggatgccacaggatt

SEQ ID NO: 729 - DNA, 428 bp, Rattus sp.
attttgcatacttttaatttcagaacaaaataaaacaaacaaaaaaacacaatacacaacacccaaccctgctattctgtgggaggggatcttcctgccttaaggcacaaggacaggatagaagagattcttgtagacatgagcagagagccaggtgggtcagggccagtcaaggctgttgggggagccacagggatactatacagagggcgggggcttcccaggagcctttaatccacttcttccatgcgagaggcatcctctcctctaagtactctgtctggtcttctttgaggtgaaggatcactttggtaccccggccaatgggctcaccgtggtctgcacggacagtgaaggatccaccagcagaagactcccaggcatactgctcatcatcgatgtgcttcgtgagtgtttcttcaccacct

SEQ ID NO: 730 - DNA, 1052 bp, Rattus sp.
gcagcggggaccttattggactatctccccttaagtgggaagggcttagtcaaatgcagtaaagagctataaaacaccgagaactcttgatgtgttgtgaaacttagagggagcagctttttaacaagagaactcaagcaattgctgccatgccggggaagccagtccttcactatttcgatggcagggggagaatggagcccatccggtggctcctggctgcagctggagtagagtttgaagaacaatttctgaaaactcgggatgacctggccaggctaaggaatgatgggagtttgatgttccagcaagtgcccatggtggagattgatgggatgaagctggtgcagaccagagccattctcaactacattgccaccaaatacaacctctatgggaaggacatgaaggagagagccctcatcgacatgtatgcagaaggagtggcggatctggatgaaatagttctccattacccttacattccccctggggagaaagaggcaagtcttgccaaaatcaaggacaaagcaaggaaccgttactttcctgcctttgaaaaggtgttgaagagccatggacaagattatctcgttggcaataggctgagcagggctgatgtttacctagttcaagttctctaccatgtggaagagctggaccccagcgctttggccaacttccctctgctgaaggccctgagaaccagagtcagcaacctccccacagtgaagaagtttcttcagcctggcagccagaggaagccattagaggatgagaaatgtgtagaatctgcagttaagatcttcagttaattcaggcatctatggatacactgtacccacaaagccagccttcgaaagctttgcaacaatcgcatattttgactaaatgttgaccctacttattgggaggccaacacgttttctaatgcttctgtgttaattcatatagacatgactgatgaggaattgctgggatgctatttggttgtagttaaaatttgaaatcatgatcacttcctcagatattactttgaatctcaataaaaa

SEQ ID NO: 731 - DNA, 413 bp, Rattus norvegicus (Norway rat)
atgaagctgcttgcaatggttgcactgctggtcaccatctgtagcctagaaggagctttggttcggagacaggcagcggagacggatgtgcagaccctgttcagccagtatcttcagagtttaactgactatggcaaggatttgatggagaaggcccagccctcagagattcagaaccaagccaaggcttactttcagaatgcacaggagagactgacaccctttgtccagagaactgggacgaatctgatggacttcttaagccgtttaatgagccccgaggagaaaccagctcctgccgctaagtgaggtgtgtcaggactcgtcttcctaccccagctgacccactggccatcgctggagtccctctcccgactttctgcttgtcttttccaataaattcggaaggagtt

SEQ ID NO: 732 - DNA, 2324 bp, Rattus norvegicus (Norway rat)
gtgaacgtgtttggcagcggcaactaaattcagaaaacatcatggcagagcaggtggctttgagccggacccaggtgtgtgggatcctgagggaagagttgtaccagggtgatgccttccaccaagctgatacacacatatttatcatcatgggtgcatcgggtgacctggccaagaagaagatttatcctaccatctggtggctgttccgggatggccttctacccgaagacaccttcattgtaggctatgcccgctcacgactcacagtggatgacatccgcaaacagagtgagcccttctttaaagtcactccagaagaaagacccaagctagaggagttctttgcccgtaactcctatgtagctggccagtatgatgatccagcctcctacaagcacctcaacagccacatgaatgccctgcaccagggaatgcaggccaaccgtctgttctacctggccttgccccccactgtctatgaagcagtcaccaagaacattcaagagatctgcatgagtcagacaggctggaaccgcatcatagtggagaagcccttcgggagagacctgcagagctccaatcaactgtcgaaccacatctcctctctgtttcgtgaggaccagatctaccgcattgaccactacctgggcaaagagatggtccagaacctcatggtgctgagatttgccaacaggatctttggacccatctggaatcgagacaacattgcttgtgtgatccttacatttaaagagccctttggtactgagggtcgtgggggctattttgatgaatttgggatcatcagggatgtcatgcagaaccacctcctgcagatgttgtgtctagtggccatggaaaagcctgcctctacagattcagatgatgtccgtgatgagaaggtcaaagtgttaaaatgtatctcagaggtggaaactgacaacgtggtccttggccagtatgtggggaaccccagtggagaaggagaagctaccaatgggtacttagatgaccccacagtaccccatgggtctaccactgctacctttgcagcagctgtcctctatgtggagaatgaacggtgggatggagtacccttcatcctgcgctgtggcaaagctctgaatgagcgcaaagctgaagtgagacttcagttccgcgatgtggcaggtgacatcttccaccagcagtgcaagcgtaacgagctggtcatccgtgtgcagcccaatgaggcggtatacaccaagatgatgaccaagaagcctggcatgttcttcaaccctgaggagtctgagctggacctaacctatggcaacagatacaagaatgtgaagctccctgatgcctatgaacgcctcatcctggatgtcttctgtgggagccaaatgcactttgtccgtagtgatgaactcagggaagcctggcgtatcttcacaccattgctgcacaagattgatcgagagaagccccagcccatcccgtatgtctatggcagccgaggtcccacagaggcagatgagctgatgaagagagtgggcttccagtatgagggtacctacaagtgggtgaaccctcacaagctctgagccctggaaacttacaccatctgcactctgcctcttctggccaccctttctgcatctgcccttctcaccatctaaccctctattaggactattgacctcatattggaaagactttgggaccataggccttagctacacattctagtccctgggcttaggccaccattctgtcctatgctgctgccactgccactaccactaagcccagctacattcctcagataccaggcattcaaaacgcattgcaatgctttcaggaccaccactgtccctatctgagccacccatctttccacaagacctgaatcacctcctcccctcaatcccctgcagaaagaacgcctatcagtctgtccctggactccttaagataggagttaggaacaattgggaggagccttgggccttggagggacaatgaccaaaccacacttccctgagactgtgggcaagctcctcaaaacttaaagtgatcaaggacacccatctgagaggacctgcccatagccacactagccttagtgctacttgacattcctcctcaccagctggaagaactctcatgctgcctagcaatattttgggggccatagatatctcctaaacaattccatagtccatagtcagcctcatccaacccatgggcagcctccttaccaaaggaaggtaagagcagcagctagaattttcctaccccaaccctgccattaaatcctcaaaaaaaaaaaaaaaaaa

SEQ ID NO: 733 - DNA, 859 bp, Rattus rattus (black rat)
tgcttcctgagtcacccgcaaacgagagcaggaccctcttggctctccgtctgctcggcgcagcgatgtccggggcgtccgccaggagcctggggaagggaagcgcgccccctggcccggtcccggaggccagatccgagtctacagcatgaggttctgtccctttgctcagaggacgctgatggtcctgaaggccaagggaatccggcatgaaatcatcaacatcaacctgaagaataagcccgagtggttctttgagaagaatccctttgggctggtgccggttctggagaacactcagggtcacttgatcactgaatctgtcatcacttgcgagtacctggatgaagcatacccggagaagaagttattcccagatgacccgtacgagaaagcttgccagaagatgacctttgagttattctcaaaggtgccgtctctggttacgagttttattagggcgaagagaaaggaagaccatccgggcataaaggaagaactgaagaaagagttcagcaagctagaagaggctatggctaataagaggacagccttcttcggtgggaattcgctctcaatgatcgattatcttatttggccgtggtttcagcgactggaagcactggagctcaatgagtgtatagaccacaccccaaaactcaagctctggatggcaaccatgcaggaagaccctgtggcatcatcccacttcattgatgccaagacctaccgtgattacttaagtctctacctacaggacagccccgaggcctgtgattatgggctctgaggggcaagagccctcagcgaatgatgttttccttcatcgattgaatagcatgcttttattttacccatt

SEQ ID NO: 734 - DNA, 1442 bp, Rattus norvegicus (Norway rat)
aattccctggggcgccctcttttaaaaatggagtcccaaatacagagaagatttcatcaccatggtctccctgtgtcaaagagctcttgttcttccgccatgtggctctgtgctctggtctgggcttctcttgctgtttgcccaatttggggacacccatcctcaccaccagtggtggacaccacaaaaggcaaagtcctggggaagtatgtcagcttagaaggatttacacagcctgtggccgtcttcctgggagtcccttttgccaagcctcctcttggatctctgaggtttgctccaccagagcctgcagagccctggagcttcgtgaagaacaccaccacctacccgcctatgtgctcccaagatggagttgtgggaaagttactcgcagatatgttgagcaccggaaaagagagtatacctctcgagttttccgaagactgtctctacctgaatatttacagtcctgctgacttgacaaaaaacagccgattgcccgtgatggtgtggatccatggaggtggactaataataggcggagcatcaccctatagtggactagctctctctgcccacgaaaacgtggtggtggtaaccattcaataccgcctgggtatttggggattgtttagcaccggtgatgaacacagccgggggaactgggctcacttggaccagctggctgcactacgctgggtccaggataacattgcaaactttggagggaacccggattcagtgaccatctttggagagtcagcaggaggtgtcagtgtctctgctcttgtcttatctcctctggccaagaacctcttccacagagccatttctgagagtggtgtgctcctcactacaaacctggacaagaagaatactcaggctgtggctcaaatgattgctactctttctgggtgtaataacacctcatcagccgccatggttcagtgcttgcgccagaagacagaggctgagctcttggagcttacagtgaaactggacaatacctccatgtccactgtgattgatggagtggtactgccaaagacaccggaagagatcctgactgagaagagtttcaacacggtcccctacatagtgggcttcaacaagcaagagtttggctggatcattccaacgatgatgggaaatctactctctgaaggcagaatgaatgagaaaatggccagttctttcttgaagaggttcagccctaaccttaacatctctgagagtgtgattccagcaatcattgagaagtacttaagaggaacagatgaccctgccaaaaagaacgaacttctcctggacatgttttcagatgtctttttcggtatcccagctgtactcatgtcccgtagcctcagagatgccggagcgcccacctacatgtatgagtttcagtatcgcccaagcttcgtgtctgaccagagaccccagac

SEQ ID NO: 735 - DNA, 2602 bp, Rattus sp.
ctgctgcctgcactttgccctggtcctccaatggcttcaacccgtgccaggcccatgctgcctctgctcctggtcctggtcgccgttgtgatccccgggcctgtcggtgctcaggtatccatccatcccacagaagccttcctgcctcggggtggatccgtgcaggtgaactgctcttcctcttgcgaagacgagaacctcggcctggggttggagactaactggatgaaagacgaactatcgagtggacacaactggaagctcttcaagctgagcgacattggggaagacagcagaccactgtgctttgagaactgtggcaccacgcagtcctcggcttctgccaccatcactgtgtattcgttcccagagcgagtggagctggatcctctgcccgcctggcagcaggtgggcaagaacctcatcctgcgctgcctggtggaaggcggagcaccgcggacacagctctcagtagtgctgctccgtgggaatgagacactgagccgccaggcagtggatggggaccccaaggagatcacattcacggtgctggccagcagaggcgaccacggagccaatttctcatgcttcacagaactggacctcaggccacaagggctgtcactgttcaagaatgtctccgaggtcaggcagctccggactttcgatcttccgactagggtcctgaagctcgacacccctgacctcctggaggtgggcacccagcagaagttcttgtgttccctggaaggcctgtttcctgcctctgaagctcagatatacctggagatgggaggccagatgctgaccctggagagcacaaacagcagagattttgtgtcagccactgcctcagtggaggtgactgagaagttggacagaaccctgcagctgcgctgtgttttggagctggcggaccagaccctggagatggagaagaccttgagaatctacaacttttcagctcccatcctgaccctgagccagccggaggtctcagaaggggaccaagtaactgtgaagtgtgaagcccacggtggggcacaggtggtgcttctgaacagtacttcccccaggccacccacctcacagggtacttcccccaggccacccacctcacagatccaattcacactgaatgccagcccggaggatcacaaacgacgcttcttttgctctgcggccttggaggtggatgggaagtccctgtttaaaaaccagaccttggaactccatgtgctatatggtcctcacctggacaagaaggactgcttggggaactggacctggcaagaggggtctcagcagactcttacatgccagccccaggggaatccagcccctaatctgacctgcagccggaaagcagatggtgtcccgctgcctatcgggatggtgaagtctgtcaaacgggagatgaatggtacctacaagtgccgtgcctttagctcccgtgggagtatcaccagggacgtgcacctgacagtgctgtaccatgatcagaatacctgggtcataattgttggtgtgttggtactgatcattgcgggcttcgtgatcgtggcgtccatttacacctattaccgccagaggaagatcaggatatacaagttacagaaggctcaggaggaggccctaaaactcaaggtacaagccccgcctccctgagcccactggacaggacacctgcctgggccccgctgctcttgaacagatcaatggacagcatttacccctcacccacctcctctggctgtcacaggacaggacagtggcctggggatgcatacttgtagcctcaggcctaagaggactcggaggggcaagactgtgaactcgtgacctggacacacctacagcctggtgggcctgcagccaagaaaggctgacttccttctctattacccctgctgaggggccccctaccttaggaaggtgtgatatccggtagacacaagcaagagaagaaaaggaacaccatgcttcctctgacatgggaaagctgggacactgtccccaactcttgttgatgtatttattaattcagagttctgacagttatttattgagtaccctgtacagacactagaggagtgagcaggttaacatgtaagttattgcctagaccctggtgaaggggcacaacagagtctggggaaagatcatacgggtttgggcttctccacaggtcagggtgctttcctcaaaagagctgatttctttcacgagtcatataaatactatgtggacgagcagtggccctctgctcgtagacctctctgggacccctgcctcctcccacagcctggagtctcccagcaccagcatgggtgaccacctccccacctacatacattcctacctttgttcccaatgtcaaccaccatgcctaaatatggacgctcacctttagcagctcaacaatggagtctcatgcccgtgaaattatggtcaatccctgcatgcctccacccggctccacctcaaagagaatgcctgggagaaaatgttccaaccacttagaagggtcctgcaagctgttgtgggagggtaggcacccctcccagcgcagaagcctttcctttgaatcaataaagtttta

SEQ ID NO: 736 - DNA, 1018 bp, Rattus norvegicus (Norway rat); identical to SEQ ID NO: 134

SEQ ID NO: 737 - DNA, 514 bp, Rattus norvegicus (rat); identical to SEQ ID NO: 135

SEQ ID NO: 738 - DNA, 1879 bp, Rattus norvegicus (Norway rat); identical to SEQ ID NO: 150

SEQ ID NO: 739 - DNA, 1560 bp, Rattus norvegicus (Norway rat)
atgccttctgtgtatggattcccagccttcacatcagccacagagctgctcctggccgtcaccacattctgccttggattctgggtggttagagtcacaagaacctgggttcccaaaggtctgaagagtccacccggaccctggggcttgcccttcatagggcacgtgctgaccctggggaagaacccacacctgtcactgacaaaactgagtcagcagtatggggacgtgctgcagatccgtattggctccacacccgtggtggtgctgagcggcctgaacaccatcaagcaggccctggtgaaacagggggatgacttcaaaggccggccagacctctacagcttcacacttatcgctaatggccagagcatgactttcaacccagactctggaccgctgtgggctgcccgccggcgcctggcccagaatgcgctgaagagtttctccatagcctcagacccaacactggcatcctcttgctacttggaagagcacgtgagcaaagaggctgaatacttaatcagcaagttccagaagctgatggcagaggttggccacttcgaccctttcaagtatttggtggtgtcagtggccaatgtcatctgtgccatatgctttggcagacgttatgaccacgatgaccaagagctgctcagcatagtcaatctaagcaatgagtttggggaggttactggttctggatacccagctgacttcattcctatcctccgttacctccctaactcttccctggatgccttcaaggacttgaataagaagttctacagtttcatgaagaagctaatcaaagagcactacaggacatttgagaagggccacatccgggacatcacagacagcctcattgagcattgtcaggacaggaggctggacgagaatgccaatgtccagctctcagatgataaggtcattacgattgtttttgacctctttggagctgggtttgacacaatcacaactgctatctcttggagcctcatgtacctggtaaccaaccctaggatacagagaaagatccaggaggagttagacacagtgattggcagggatcggcagccccggctttctgacagacctcagctgccctatctggaggccttcatcctggagatctaccgatacacatcctttgtccccttcaccatcccccacagcacaacgagggacacctcactgaatgggttccacattcccaaggagtgctgcatcttcataaaccagtggcaggtcaaccatgatgagaagcagtggaaagacccctttgtgttccgcccagagcggtttcttaccaatgacaacacggccatcgacaagaccctgagtgagaaggtgatgctcttcggcttgggaaagcgccggtgcattggggagatcccggccaagtgggaagtcttcctcttcttagccatcctcctgcatcagctggagttcactgtgccaccgggcgtgaaggtggacctgacacccagctatgggctgaccatgaagcccagaacctgtgaacacgtccaggcctggccacgcttctccaagtga

SEQ ID NO: 740 - DNA, 341 bp, Rattus sp.
  misc_feature (16)..(16): n
  misc_feature (149)..(149): n
cagaaccatgcctatnatactgggatactggaacgtccgcgggctgacacacccgatccgcctgctcctggaatacacagactcaagctatgaggagaagagatacgccatggggacgctcccgactatgacagaagccagtggctgantgagaagttcaaactgggcctggacttccccaatgtggagagacagaggaggagcggattcgtgcagacattgtggagaaccaggtcatggacaaccgcatgcagctcatcatgctttgttacaaccccgactttgagaagcagaagccagagttcttgaagaccatccctgagaagatgaagctctactct

SEQ ID NO: 741 - DNA, 684 bp, Rattus norvegicus (Norway rat)
acgagtgctgacatgatcactctctgtgttcacaggaaagcgcatttgtcttggcgaaggcattgcccgaaatgaattgttcctcttcttcaccaccatcctccagaacttctctgtgtcaagccatttggctcccaaggacattgacctcacgcccatggagagtggcattgcaaaaatacctccaacgtaccagatctgcttctcagctcggtgatcgggctgaggcagccaggtgccccagttctgttgggaatggcctcatgtttctgcctctgggggacctgctgaaaaccaggctccaaggccactgctccacatcttcctattgcagttctccaaagtcccaaggcttgttcttattcctgtgaatggcactgaagaagtcaatcgactgtcttattttgacatgtgacagagatttcatgagtacacatctcatgctgagtcacttccctcttcctcctaatagcccacgtccccacttatcagccctccatggtctgtgatctgtgctaatggactctgtatatggtctcagtgctatgtctacagacttacatagtatgtatggttcaggtaaacagaatcacagagtgtgtgagcttcggtgtgttgtgcctttacttcacataatattatctaggttcctgtgttctacaggccacagtcacacacattcat

SEQ ID NO: 742 - DNA, 2509 bp, Rattus norvegicus (Norway rat)
taaagagacggatgacctacagccccaggcccacccattcaacaggcctagctcattcccaagcccagacatcaaggcatgggacacccacgcatggcagcttcgtgtccagctttattagggacagcatgtttaggtgaggtctggggagggataaaggcatgagaatatactttccccttagagcaaccttcggaggcagcaggatagatggccagacacatctggaacatggaggtctcacggctcaagagttggtgttgttagttggtcctcagggccagactcccagaggccagtgaacttatcagtgaacttgctccagtagcctttcagggatttgaagcgattgtccatccagcccctgggggttaaaacagtaataggtgtgtgtgtgtgtgtgtgtgtgtgtgtgtgtgtgtgtgtgtgtgtgtgtgtgtgaaaagatctcctgtgggcagctagacccaggggtgcacctaggcctccactggctccctaagccaccagcaccaccttacctagcaccaccctcagaatcacctgcagctaccactcaaggtggaggagatggtaaaggctaagaaaacccaccttcatcagagccccattacctcccgtccaatctctcttcaggcctgaggcaccaaccactggggaggtggatactaaggtcagcttgcctttgtagtccatagaaacagtgtccttgaggtgtcccatccctggctctaagtggatggatcaagggaggggtgaactttctgtttggaaacattaccagagggcttctaagctctgtgatctaggccaggttatctaactctttcccagctgcggaggtagatagtacctctccacaacctgttctgggcacagagactgtcaacatcttttgctacataggcaatgatcaaatgtcacgtaaacgattggcagggtaatgtttcatcacgggcaagatgcctcacttaggttgagcccagggatggaaacagggcagaacccccaacccgtaatgctcaaccttccaacttccctgtaatcagagcaggaaggcctcccagagcacaccctagaccctgtgctcaaagaagaaaacctgcagggaggctgaacgctcctcaggctgctctgaggagaagcagaggagatagaagaagtctgcttgcactgcctgtcatcttagtcacagtccccagcaaaggccccgtgagagactggatgctcagacgggcccaagaccctggtaaacttggtgggccacagtctccgtgtccagggcctcagcaccagggcaggaggggcgaggaccaggaaaggaggtccgtgtgcatacctggccaccacagctatatcagactcctgcatgctgcttagtgcatcctggaccgtcttggaggcttgttccatgtagccctgcatagagcccagcagcaaggatccctctccctcatcagctcctgcaagagagcagagttgagccaggccagccctcagctcttgcccagccatcgcttttcagggtagggtccccagaccagctcccgcagaaatcccagccccacttccaccagcttacgggcagaggccaggagagccacgagggccacgatgaggagcattcggggctgcatggcacctgtgcacctgcgggagaccatcttgtgagagggtattgtggatctccacatctaagcccttccctggagaacaccacggcccctctgtcatgaatccccaagcctttctcctactgatatcagctctcggagagagaactaagaagacccagacccaccccaaggggctggaaggtggaatgtgggaatcctctgcaaagcagaacatctacccagcctctgccccaatatatggagaaacaacaggtttctttttctctctaggcttcaggcttttcagtctggggtaggcacggatatcaaaggcttctaatagctcagagcaagacgaacaaggggcagcatgacccagttcccaatcagctctgccactacccagtgcaaggcttttttgcccagtggcctccctttcctcagcttctagcctcccccacccaccaggatacccaagggctggaggccgtgaattccaagcattctgtaggctagctggctgagtggccagagcgtcttctctctgtctcctccctcccttcctctcctccccaggggcattacctggagtagctagctgcttctagggataaaactgggcaggcaagccgggacgctctgatctgttttatattggctccaggatgggacagcgggcacagaaggcccagtgagctggtcaaaggtcacctgctgaacagtccagaccagagcccgaggcagggaggccatgcagccagctgccagaggagttgagaaatccctcagagattgcccacaccgttcacttccacctccgcagccaagagatcagctactgacctgcctcgatgagactggtgagacaggaaaagactcaggggacaagcctt

SEQ ID NO: 743 - DNA, 2237 bp, Rattus norvegicus (Norway rat); identical to SEQ ID NO: 641

SEQ ID NO: 744 - DNA, 2495 bp, Rattus norvegicus (Norway rat); identical to SEQ ID NO: 700

SEQ ID NO: 745 - DNA, 1346 bp, Rattus norvegicus (Norway rat); identical to SEQ ID NO: 23

SEQ ID NO: 746 - DNA, 1780 bp, Rattus norvegicus (Norway rat)
tctcttgctgtttgcccaatttggggacacccatcctcaccaccagtggtggacaccacaaaaggcaaagtcctggggaagtatgtcagcttagaaggatttacacagcctgtggccgtcttcctgggagtcccttttgccaagcctcctcttggatctctgaggtttgctccaccagagcctgcagagccctggagcttcgtgaagaacaccaccacctacccgcctatgtgctcccaagatggagttgtgggaaagttactcgcagatatgttgagcaccggaaaagagagtatacctctcgagttttccgaagactgtctctacctgaatatttacagtcctgctgacttgacaaaaaacagccgattgcccgtgatggtgtggatccatggaggtggactaataataggcggagcatcaccctatagtggactagctctctctgcccacgaaaacgtggtggtggtaaccattcaataccgcctgggatttgggggattgtttagcaccggtgatgaacacagccgggggaactgggctcacttggaccagctggctgcactacgctgggtccaggataacattgcaaactttggagggaacccggattcagtgaccatctttggagagtcagcaggaggtgtcagtgtctctgctcttgtcttatctcctctggccaagaacctcttccacagagccatttctgagagtggtgtggtcctcactacaaacctggacaagaagaatactcaggctgtggctcaaatgattgctactctttctgggtgtaataacacctcatcagccgccatggttcagtgcttgcgccagaagacagaggctgagctcttggagcttacagtgaaactggacaatacctccatgtccactgtgattgatggagtggtactgccaaagacaccggaagagatcctgactgagaagagtttcaacacggtcccctacatagtgggcttcaacaagcaagagtttggctggatcattccaacgatgatgggaaatctactctctgaaggcagaatgaatgagaaaatggccagttctttcttgaagaggttcagccctaaccttaacatctctgagagtgtgattccagcaatcattgagaagtacttaagaggaacagatgaccctgccaaaaagaaggaacttctcctggacatgttttcagatgtctttttcggtatcccagctgtactcatgtcccgtagcctcagagatgccggagcgcccacctacatgtatgagtttcagtatcgcccaagcttcgtgtctgaccagagaccccagacagttcagggagaccatggtgatgaaatcttctctgtatttgggactccatttttaaaagagggcgcctcagaagaggagaccaatcttagcaagttggtgatgaagttctgggccaactttgctcgaaatgggaacccaaatggagaggggctgcctcactggccaaaatatgatcagaaggaagggtatttgcagattggtgccaccacccagcaagcccagaaactgaaaggagaagaagtggctttctggactgagctcttggctaagaatccacctcagacagaacacactgaacacacataaatgggtctctgccagcctcagtaccagaggagcaaagatggggctattccacaaaggatggctatttgccaaagatgaatcttacagaggaaactgcacaattgtacagttggggtatttgtatctcaactttgaaataaatttccttttagaaagc

SEQ ID NO: 747 - DNA, 334 bp, Rattus norvegicus (Norway rat)
ggcggggtcctggatatcaccattgggctcacttcctgcttcgtgtgttgtcttctacctgcgggctgggtcctgtcacacctggaaagctacaagaagcgggagtgaagggagcgtcttccctcatcctttgactagaccactcttgccagcccaccttgatcatgtttcctgcattcctggctggcttacccygggatcatgttattcaattccagtcacctcttctgcaatcatgacctctcgatgtctccatggtgacaactgggaccacatatattggttctgcttgatggggtccccctttgtaacaataaagtctatttaaaccttg

SEQ ID NO: 748 - DNA, 1000 bp, Rattus norvegicus (Norway rat)
ctggaatcctaacagcacctacacaaagctatttataatgccagactatacttggtttgaaggaataccttttcatgcctttgggatttcaaaagaaactttgcaaaatgtttgtaataagtttgtggtgaaagacgaagatttgattttattggcttatcccaagtcaggaacgaactggctgattgaaattgtctgcttgattcagaccaagggagatcccaagtggatccaatctgtgaccatctgggatcgctcaccctggatagagactgatgtaggatatgatatattaatcaaaaagaaaggaccacgactcatgacctcccatcttcccatgcatcttttctccaagtctctcttcagttccaaggccaaggtgatctatctcgtcagaaatcccagagatgttcttgtttctggttattatttctggggtaattcaactcttgcgaagaagccagactcactgggaacttatgttgaatggttcctcaaaggaaatgttctatatggatcatggtttgagcacatccgtgcctggctgtccatgcaagaatgggacaacttcttgttactgtactatgaagacatgaaaaaggatacaatgggaaccataaagaagatatgtgacttcctggggaaaaaattagagccagatgagctggatttggtcctcaagtatagttccttccaagtcatgaaagaaaatgacatgtccaattatagcctcctgatgaaaaaatcaatttttactggtactggcctcatgaggaaaggcactgttggggactggaagaatcacttcactgtatcccaagctgaagcctttgataaagtgtttcaggagaaaatggccggtttccctccagggatgttcccatgggaataaaatttcaaaagttttaaatattttatgaacattgatatttatgtttctgttgttctatgtctgaataactgaatgtggtcatcgaataaatcctgttctggtattgtg

SEQ ID NO: 749 - DNA, 1715 bp, Rattus norvegicus (Norway rat); identical to SEQ ID NO: 251

SEQ ID NO: 750 - DNA, 19080 bp, Rattus norvegicus (Norway rat); identical to SEQ ID NO: 722
  misc_feature (6102)..(6102): n
  misc_feature (6103)..(6103): n
  misc_feature (6320)..(6320): n
  misc_feature (6321)..(6321): n
  misc_feature (6322)..(6322): n
  misc_feature (6323)..(6323): n
  misc_feature (6834)..(6834): n
  misc_feature (6840)..(6840): n
  misc_feature (6843)..(6843): n
  misc_feature (6844)..(6844): n
  misc_feature (6846)..(6846): n

SEQ ID NO: 751 - DNA, 9136 bp, Rattus norvegicus (Norway rat); identical to SEQ ID NO: 261

SEQ ID NO: 752 - DNA, 560 bp, Rattus sp.
gaaagtgtctgcaagttttatttgtagactctgttaagcttgaaccataaaagctgcaaaacagtggtttagagagcatgtcaataccatgggggttggtgggtggaaactgttccttctgccagttcctaaggctggaagtggctagggcaggcagtggcgaggaaatagctggatgagctgaagcttgggtggcagtgcttactcaagcctgactcctgcctgtctcaggccctggggtcatatacacggcccatgaagactgggaacttgtgtcgctggtcccagagcaggaagaggaaaggctgctgcacctcaaagatgagtaagtttcgggccacggagatggtggaggctgcggctgcttccacacctgtctctgtcagttccaacaccgtctcgtgtttcatggaagacacctgaagatctgggtcctcagtcagcccacacaggttgagatcgtaagtgaagtcaaagaattccagtttctccatgattgacagcatgtcttggatgctctttactttaatgcgaggcatcatcacgtaagtgggctgaaa

SEQ ID NO: 753 - DNA, 400 bp, Rattus norvegicus (Norway rat); identical to SEQ ID NO: 703

SEQ ID NO: 754 - DNA, 533 bp, Rattus norvegicus (Norway rat)
  misc_feature (525)..(525): n
tttttttttttttttctgagagccacagaagtcctgctaacacctggacaaggagcctggtgtagcctcctacaccacacagcttcgccaaagccacgaagagaaaggcatctactcacgtgcccaggaagacatccttggcctcagcatagttcttacacacttccttatcctcaacaaagtcagcagctattgagggcagatcggcaggaatgttgtcatgttctgtctcagcgagacactgggatttctgcagcactggcttatcacagcaagcctgcagtttgctggagatagtggcctggttctcacacatgtacttggcaagttctgcctgtgagaatggaaggcaaaggtttcagagaaattctcttggctacattttatccccgcaccactgttgggctgggatagcctatccatcctgctctgagccattcgcaaccaaagtggcttctagaaacacactctcagccacgaagtgcttcagtactatgaccagaacattccaatgggattcgaganagactgtt

SEQ ID NO: 755 - DNA, 559 bp, Rattus norvegicus (Norway rat)
tttttttttttttttttgtaggattattagttttcacatttctattggagggcaacagggaagggacggattccatcaacagaagcattcacaggttcttgagccattccaagcttggacccagaggttcctgtgggtggctgggcacatcaggcatgttcccattatctctcacaggcactgggtagttgtagggtgtggccttgttgatcatgctagcatactgggtgtaggggctaatcatgggcataattatagcgaggccccagacagtgaaggacaccaccagcaccggctcctttgcccaggcattcttaaggaaggcggagattcctagaggtgagaaaaaagtcgcccttggggactgctgcggtgacctctaacactctcgtatcaccctgctctgcaccctattggctgctgcgcccctcttctgggacggatcctaccactccccaaggctctactgagcctcagccacgggtcaagccacggtttcctggaattacatggtccccgcgcgcccagaacgcgtacttactagccctcgtgccgaatt

SEQ ID NO: 756 - DNA, 555 bp, Rattus sp.
ccagggacctccgtagtcggtctccctatcccactcccaaacctcagagcaggaaatgggcttggctgagaagattcatgcttgatgaccaggggaggcgtgcagccccccaagaagaaggggaaaagaaaaacggggaggttgaaaagcagagaggtgcaccttcccttctgaggaagcaattctggtctgggaccagttgcaaggggttagtaagagaaacctaaggggtgcttacatttttattctggcaaatgaatctcttaaaaggctccctcctaggggtgcttacatttttattctggcaaatgaatctcttaaaaggctccctccttcgttcgggggaacagcacatgtacctgtgtcagcgtgagatgcaatgctacacaagaacgtggcattgggccaatcatgtggacccctgtgctgctcccaagggagaggttctgtttgggtgtgggataaatctaaacaagcatacactcgtgttatatgtggccttaagggtaggggagcaaaaggaatggacttctctgtagagcagctcaagaggga

SEQ ID NO: 757 - DNA, 711 bp, Rattus sp.; identical to SEQ ID NO: 29

SEQ ID NO: 758 - DNA, 153 bp, Rattus norvegicus (rat); identical to SEQ ID NO: 690

SEQ ID NO: 759 - DNA, 664 bp, Rattus sp.; identical to SEQ ID NO: 707

SEQ ID NO: 760 - DNA, 654 bp, Rattus sp.; identical to SEQ ID NO: 30

SEQ ID NO: 761 - DNA, 423 bp, Rattus sp.
gttcctaaattttatttatgaattaatacaaaacatggcagaccaatgtgtcttaatcctcatcctcctcctcctcctcgtcctggttgatctggaagtagcgcagctcgtagctctccttgctgttggcaacgacgcgcagccagtctcggaggttgttcttcttcaaatattttttggtgagatatttcaaataccttttggagaaaggcacctcggaagtgacagtgatcttgctcttgctccgctcgatggtcacaacccctccgccaaggttaccagctttcccgttcaccttgatcctctcctggaggaactgctcaaaattggcagcatccatgattccatcttctacagggtgagtgcagtcaagggtgaacttcaaaacctgcttctttttttttgccccccttcgccacaagc

SEQ ID NO: 762 - DNA, 495 bp, Rattus sp.; identical to SEQ ID NO: 418
  misc_feature (308)..(308): n

SEQ ID NO: 763 - DNA, 613 bp, Rattus sp.; identical to SEQ ID NO: 710

SEQ ID NO: 764 - DNA, 449 bp, Rattus norvegicus (Norway rat)
ttttttttttttttcttgaaaaaacggggtttattgatttttaaactgcaaatagtcgttacaaaaagtttttttttcttttaaataaattcacacaaagaaagagaaatagaaagcgacggtagtgaccagcaagaggaataataattacattcatctttatgtgtgtgccagttgtttacatcaacatcggaaaactccaacctggagtccagaacctcaaatctgcaagcggaatgtcttgagatgggcacatggaattcaaagggtttttctctctctctcttttttttttttttgttttcccttttagaagctatacataaatggtggttttccttctgtactgtcacagaacttatacattctcagtcctacctgtgaaaggcctaaggagaaaaaaaaacctttgcggccgctccaacatcagaacctcgtgccgaattctt

SEQ ID NO: 765 - DNA, 651 bp, Rattus sp.
ctaggcaagcgctctaccactgagctaaatccccaacccctggatatgttttaaaggaggaaaggaccagtctttgtggcagcacaaatgcttagtgataatactatgtcagtctgtctgcgatggatcagcccagggtggaggctgcttttgctttggaggacagggcttgcctgaagcgcctcttcaggtcctgcatgttgggggatcggggccgggggatgatggatgctctcctccgctccccgctaaggctgtgcagcttgctcacttctttgcagagatgttgaaacacatcgcagacgtcttcgtagttttcactagtagaaatttcaaggaagagactacccagctcattggcgagctgaagaccttcgtgtgtctgcacctgccgggcatgcaaaaggtcccctttgtttcccacgatgacgacgggggcttttccatcagggtgagaatttattttgtgaatgtggcacaaatcatgtaaatgtttttaagtgtgaacaggaaaatgaacgtaggccattacattaatttctctattgaaacaatgacagaaaacaattctatttccaaagctacagaagagcacacagtgctacttgtaagtggcgtctgatgaaggtcttgcatatctggtgtcagttg

SEQ ID NO: 766 - DNA, 550 bp, Rattus sp.
agggctcagagaactgaccccgaggctttatctgctgatttttattgctcatttgtttaagcactgagggtggaacccagcatccagcacagaaggacccagtgagcgtgtgtgcgtgcgcgtggtagtctgcacagagctcctcccttccccagtttactggggacgctccccacacaccggccaccaaccctgccctgtttatcaaatcctgactttcttggcccaagacgctttggtgaaggggttttctcttggcaggcgcagtgtgcttggtggtggcttttctcaggatcttgttgggtttttgggcgctggctgaggaagcctgcacgccactttacgagttcttctgtggcactttgacggtgaccgtcttcacttccgtgtaggcctgcaggccatactcgcccagctccctgccgctccccgacatcttatagccaccaaatggggactgggccccaaacacatcgtagcagttgatccacacagtcccagcctgcagagcttgggacaggtaattggccttgtccaggtcctttgtgaa

SEQ ID NO: 767 - DNA, 465 bp, Rattus sp.; identical to SEQ ID NO: 711

SEQ ID NO: 768 - DNA, 582 bp, Rattus sp.; identical to SEQ ID NO: 712

SEQ ID NO: 769 - DNA, 2462 bp, Rattus sp.; identical to SEQ ID NO: 652

SEQ ID NO: 770 - DNA, 1052 bp, Rattus sp.; identical to SEQ ID NO: 730

SEQ ID NO: 771 - DNA, 951 bp, Rattus sp.
aagcttatgaaggctctgtgggccctgctgttggtcccattgctgacaggatgcctggccgagggagagctggaggtgacagatcagctcccagggcaaagcgaccaaccctgggagcaggccctgaaccgcttctgggattacctgcgctgggtgcagacgctttctgaccaggtccaggaagagctgcagagctcccaagtcacacaggaactgacggtactgatggaggacactatgacggaagtaaaggcatacaaaaaggagctggaggaacagctgggcccagtggcggaggagacacgggccaggctggctaaagaggtgcaggcgacacaggcccgtctgggagctgacatggaggatctacgcaaccgactcgggcagtaccgcaacgaggtaaacaccatgctgggccagagcacagatgagctgcggtcgcgcctctccacacacctgcgcaagatgcgcaagcgcctgatgcgggatgcggatgatctgcagaagcgcctggcggtgtacaaggccggggcacaggagggcgccgagcgcggtgtgagtgctatccgtgagcgcctggggccactggtggagcagggtcgtcagcgcacagccaacctaggcgctggcgccgcccagcccctgcgcgatcgcgcccaggctttgagtgaccgcatccgagggcggctggaggaagtgggcaaccaggcccgagaccgcctagaggaggtgcgtgagcagatggaggaggtgcgctccaagatggaggagcagacccagcagatacgcctgcaggccgagatcttccaggcccgcatcaagggctggttcgagccgctagtggaagacatgcagcgccagtgggcaaacctaatggagaagatacaggcctctgtggctaccaactccattgcctccaccacagtgccctggagaaatcaatgaggatcc

SEQ ID NO: 772 - DNA, 1058 bp, Rattus rattus (black rat)
ctctcgccaggcgtcctcattagagtgacatcgtctttaaaccccgcgtggcaatccctgacgcaccgccgtgatgcccagggaagacagggcgacctggaagtccaactacttccttaagatcatccaacttttggatgactacccaaaatgcttcattgtgggagcagacaatgtgggctccaagcagatgcagcagatccgcatgtccctccgcgggaaggctgtggtgctgatgggcaagaacaccatgatgcgcaaggccatccggggccacctggagaacaaccccgctctggagaagctgctgcctcacatccgggggaacgtgggctttgtgttcaccaaggaggacctcaccgagattagggacatgctgctggccaataaggtgccagctgctgcccgagccggtgccatcgccccgtgtgaggtcacagtacctgctcagaacaccggtctggggcccgagaagacctctttcttccaagctttgggcatcaccactaaaatctccagaggtaccattgaaatcctgagcgatgtgcagctgataaagactggagacaaggtgggagccagcgaagccacactgctgaacatgttgaacatctcccccttctccttcgggctgatcatccagcaggtgtttgacaatggcagcatctacagcccagaggtgctggacatcacagagcaggccctgcacactcgcttcctagagggtgtccgcaatgtggccagcgtctgtctgcagattggctacccgactgttgcctcagtgcctcactccatcatcaatggatacaaaagggtcctggctttgtctgtggagactgactacaccttcccactggctgaaaaggtcaaggccttcctggccgatccatctgcatttgcggctgcggcccctttggctgctgccaccactctggctcctgcagctgctgccccagccaaggtcgaagcaaaggaagagtcggaggaatccgatgaggacatgggattcggtctcttcgactaagcccctcacaccaagtcagcctgctttatttgag

SEQ ID NO: 773 - DNA, 435 bp, Rattus norvegicus (Norway rat)
ggatcatagtggtgggaggtggtgggtactagtgatgccccctatccgcgcgcgtctgcctccagggtgcccctccagccaggatgaggctcttcatcgcacttcctgtcctgatcgtggtcgtagccatggctttggaaggcccagcccctgcccaggcggcccctgacttttccagcgcaatggagagcttaccggataaactaaaagagtttgggaacactttggaagataaggcccgggcagccattgagcatatcaaacagaaggaaattatgatcaagactcggaactggttttcagagacgctcaacaaaatgaaggagaaattaaaaaccacatttgcctgagtgcctggcgagccacctcgcagcagcaaagagggccacgtgacgggccaggtccctcttcaaataccaataaaaacttgtagag

SEQ ID NO: 774 - DNA, 1140 bp, Rattus norvegicus (Norway rat)
ggatcctaacttcttcccaagcaccagtcactggagacataggagaggcaagaagcctctgggcaactgataaggattccccgcacccaggggaggcgatccccaagcccagcctctcagggtcctgacaagccatgctgcggagagcaatcacaggccagccaatgacagctgctccaagggcgtgtccttacctcctgcacatataaatgaaacttgctgcggggccaatacattctcattctgatagactcaggaagcaatcatggtgctctctgcagctgacaaaaccaacatcaagaactgctgggggaagattggtggccatggtggtgaatatggcgaggaggccctacagaggtaacatcaggaccctgttctttaaggacagcaggatccaaaccggaccagggactcagtgggtagctcctaagtgtgctttcccgtggcctcaacttatctctccttctcacaggatgttcgctgccttccccaccaccaagacctacttctctcacattgatgtaagccccggctctgcccaggtcaaggctcacggcaagaaggttgctgatgccctggccaaagctgcagaccacgtcgaagacctgcctggtgccctgtccactctgagcgacctgcatgcccacaaactgcgtgtggatcctgtcaacttcaaggtgtgagctcagacctggcagggggcacctgggaccttcaaggatcccttggggcagtggtgaggggcacagggggagggggaaggggttcctcatgcccagggcagggaacacagtgttccaggaaggggagcttacccagcagggtgtctactactagggactgacccttcctgtctctgcagttcctgagccactgcctgctggtgaccttggcttgccaccaccctggggatttcacacctgccatgcacgcctctctggacaaattccttgcctctgtgagcaccgtgctgacctccaagtaccgttaagccacctcctgtcgggcttgccttctgaccaggcccttcttccgtcccttgcacctgtctttgaataaagcaaaagtaggaagaatcccgtgtgcctgtttctcacatgtgcaaaggtgacaatgtttggtatgggaaaatcctcc

SEQ ID NO: 775 - DNA, 922 bp, Rattus rattus (black rat); identical to SEQ ID NO: 583

SEQ ID NO: 776 - DNA, 2093 bp, Rattus norvegicus (Norway rat)
ctctggtctcatctctgccacgccactgctcagaggcacagagtgagcaacagtttggtagcgctgagtccatccactggaaattctcctcctgtctcagcggctttagctctgcagaaatgaagcatccagcctacactctccttctctctctcatcatgtctatgtgtgctgggagcaaaggccttgctgagcagctaactaaggaaaacctgaccgtgtccctcctgcctcctaacttccacaaagagaacacagtcaccaatgactggattccagaaggagaggaagatgacgactacctggacctggagaagctgctcagtgaagatgacgactacatctatgttgtcgatgcagtttccccaacagactcagaatcaagtgctggcaacatcctgcagcttttccaaggcaaaagccggatccagcgccttaacatcctcaatgcaaagtttgccttcaacctttaccgagtcctgaaggaccaggctacctcttctgataacattttcatagcacccgttggcatttccactgccatggggatgatctccttaggtttgaggggagagacccatgaggaagtacactcagttctacacttcaaagactttgtcaatgctagcagcaagtacgaggtgacaaccattcacaacctctttcgaaagctgacccatcgcctattcagaaggaattttgggtacacacttcagtcagttaatgacctttatattcagaagcagtttcccatacgggaggacttcaaagctgccatgagagagttttactttgctgaggcccaggaggctgacttctcagatcctgccttcatatcaaaggcaaacagccacattctgaagctcaccaagggcctcataaaagaagctttggagaatacagactctgctactcagatgatgattctgaactgcatctacttcaaaggagcttggatgaataaattcccagtagaaatgacgcataaccacaacttccggctgaatgagagagaagtagtaaaagtctccatgatgcaaactaaagggaacttccttgcggcaaatgaccaggagctagactgtgacattctgcagctggagtatgtagggggcatcagcatgctaattgtaattccacggaagctgtcgggaatgaagactcttgaagcacagcttacaccccaggtagtggagagatggcaaaaaagcatgacaaacagaacccgagaggtacttctgcccaagtttaagcttgagaagaattacaacctggtggaggtcctcaagtccatgggaatcacaaagctcttcaacaagaatggcaatatgtcaggcatctcagaccagaggatcatcattgatctgttcaagcaccagagtaccatcacagtgaatgaagagggtacccaagctgcagctgtaactacagtggggtttatgccgctgtctacccaagtcagattcactgttgaccgtcccttcctgttcctagtgtatgagcaccgaaccagctgtctgctgttcatgggaagagtggccaaccctgccaagtcttaatggtgctggtctgggcacctgatgtagtttggggacactctgtaatcctgttttcattctaagaggacagagatattttgatattgataatctatgtagtttgagataataatctaacagtaaacagtgtcataagtgcacagatgttaatgcaactaatggtcgtgccagctattccctagaggtcctagacacagactgcctcagcgccaacgcctctgtcactgagaatgggcagagtggagctgacactttctcctcagttagccgtaccagtcaaggtgtctcctcagccaggcccctccatatggatggtactgaggaactctcacccttccagggaggatgtccaaggagcaccattcttgcctagtggaaaagaaacctcaacatgtctgagacatttggacttaattcaaggctgaaccttttaaattcatgtaaatatcatctgttctgctttgtgtcaatagggctaccatagcctattctagagacaaataaacaaccatatttactaagcaaaaaaaaaaa

SEQ ID NO: 777 - DNA, 3551 bp, Rattus norvegicus (Norway rat)
gtgtcctctgtctctgtctctgtctctgtctctgtctctgtctctgtctctgtctctgtctctgtctctgtctctctctctctctctctctgtgtgtgtgtgtgtgtgtgtgtgtgtgtgccttagagtctcttagactggctggcctgagagtcacagggaactacctagctacacttctcagtactgggatgagaggtgtgcattagaatgcctgcgttttacacgagctctggagactaaactcaaatcttcctacttgccaggcaagcagttaatgtcattatactgcatttccattttgatgtgttagctagtcatttctcttttaacatttggagtattttataactttggaggtagggctattcttaccctgtgaactgcttttcctctctctctctctctctctctctctctctctctctctctctctctctctctctctctcaagtcaagagattcccccctccgcatcattttcccctagttaataattaccaagaaatttgcaccaagaccaaaaaaagcctatgtatttcagaaatagattaactaggttactttttaacaaagcttaggtcaaagaatactataaaacgttggttttgccccagtcgcattactctcttgaatgtggcctcttttttaaatttaaacatgagacacttaaaacttacaggttttatttttttcctgttgtctttgactgaatccctagccctacccacaaagcctcaggatgtaggtaagaaatttacttgtgtattaccagggacaactaagtgaaggaaattactttcctttagccttttaaaactttgattattccggtggttttatttttctctctcttctcttagtatatgtatactggtcagtagtttcaaaggacccactacagattttcatattatctattctgtaggatgcttgcctttagaaacggccaacaatctggatcatgttgacttgagatgtaatttggacttcaaaaatattagaattttgtgacagatatagatatataaatatatgtatagtccaacagaagagcatagatacagtatatacatattcatacatatacatacatacacacatatgtacacactcacacacaaacacatgtataaacatttatatacaatctttaaaaaatattttttaaatatttttggttgtccaatatgtcttccagctagatgataaataccgtcaggtatatgagatcctgctttctccttcagctggcgttacacacctgcaacatactacgccaagagcaaggcgtgtcaaccgggtggaaaaggcaatttttacattttaccaaatgaggaaactttgaaattttctttgaaagaaaagaaaattttctttgaaaggtctttttaaatacctctggccagaaaggcacattttttttttacaggaatgtagtttccttaatatcatcccagagaacatatactcaagtgatattatacagactgataaggttgtatctatgtatcagagaatgtaaaaatttataatatatataacatcaatcaatcaattaatgaaaaagaggccatgcatttgaaagagagcaaggaggggttaacaggagaacaggcaggggatcatttcaatgctactcagaaattcataaatgagaacgttgcatacctgaccatcattgcatctgcccagtatgttcaggaagcatcctttgaggaggtggaaatgctggtgaaggtcatgctggattacaaggataggtgcttggctgacagcacacttccggagtgttcaaagatagctaatgatgctatccaggacatgctctgtgatatgaaggggctgccacagaagcataacttctcccattgctgtaggcaagccggctttcaaagaagactctgcttcttctacaacaagaaagctaatgtaggatttctgccccctttccctactctggatccagaagagaaatgccaagcttataaaaataacagtgaatcttttctcaacctctatatgtatgaggtggccagaaggaacccctttgccttcgccccagttcttctgaacgttgccgctaggtttgaggaggcggcgaccacgtgctgtgaacagcaacagaaagccacctactttcaagacaaggcagcccccatcacacagtatttaaaagcgttatcttcttatcaaagaaatgtttgtggagcccttttaaaatttggacccaagaccttaaactctataaacatcgccgtgtttagtaagaagttccccaagattggatttgaagaccttacgtccctcttagaagatgtttcttccatgtatgacgggtgctgtgaaggggacgtcgtgcagtgcatccggagccagagccaggttatgcaccatatttgttcaaaacaagactccatctcaagtaagatcaaagcgtgctgtgagaagaaactgccagagcgcgcagactgcataatcaacgcaaacaaggatgacagaccagaagacttatctctgagaacacccaaatttaccgacagtgaaaatgtgtgccaagagcgagattccgagcaggacaagttctttgctgagtttctttatgattactccagaagacatactgaactgtctacaccagagctcctaagaattactaaagtgtataaggatctcctggaagattgctgcaacagaaaaaacccgttaagctgttaccgccatgcggaggataagttcaacgagacaacagagcgaagccttgcgatggtccagcaagagtgcaaacagttccaggaattggggaaggacgctctacaacgccatttccttgtcaagttcaccaaggcagcccctcaactccccatggaagaactggtctcccttagtaaggaaatggtggcggctttggcaacctgctgcactctcagtgacgagttcgcctgtgtggacaacttggcagatttagttcttggagaattatgtggaatgaataagaatcgaactatcaatcccactgtggatcactgctgcagagctgactttgccttcaggagaccctgctttgagcacctgaaagccgacaccacctatgcactcccatcagtctctgcacttgtatctgctttgcgtgcagactggtgtcagcctctcaaggaggaccttcagaataagagacacaggtttctggtcaacttagtgaagtggatgccagagatcacagatgaggaacgtctgtgtttgttcacaaagttcacggctgctggggaggagtgtggcaacatacagaagcctgaggcctgtttcagtccagagagttcaaaaaccggtgatgtgagtcaagatgcagagaaacaaaggtgaacggaatgaccagagccagtaccagctcacaggatcgtcctgtggagaagttcagctcttaagaagactggaatagaaggtccttctgtaaccctttcttgaatcatgttcctacaaaaggcaataaaaagggaggataaagtttctcgcggcgcgaaaaaaaaaaaaaaaaaaaaaaaaaaaaaaaa

SEQ ID NO: 778 - DNA, 2578 bp, Rattus norvegicus (Norway rat); identical to SEQ ID NO: 609

SEQ ID NO: 779 - DNA, 1018 bp, Rattus norvegicus (Norway rat); identical to SEQ ID NO: 134

SEQ ID NO: 780 - DNA, 1560 bp, Rattus norvegicus (Norway rat); identical to SEQ ID NO: 739

SEQ ID NO: 781 - DNA, 4689 bp, Rattus norvegicus (Norway rat); identical to SEQ ID NO: 20

SEQ ID NO: 782 - DNA, 2424 bp, Rattus norvegicus (Norway rat)
tccccaaactcgggagaccagggtgaagcgaaagggggaacctcttggaatgcaacgaaactttgaggcggggatgtgagttcaggagcccaaaattcctcactcttcctaccctgctccaggttcagggcactagcaacacagaggagcccaggagtggactacatgagactaactaaaagaacacatataccgcaggatggggcaactgccttaccccctggggacccttggagtctgcagctactccccgctgcccccacctgaacccttgatcccagctctgcagcccccgcagcttcctgtttgcccactctgtttgcctagcctcgggaacagagctgatccttgaactctaagttccacatcgccagcaaaagtaagcagtgacagggccagcctgagcttatcagtctcccagcccaggccctgcccacacacatatataggtcagggaagaagacctggacacccagactgttggagagctccgggggaggtaagtgctgctacctaccctaggctacttcttagttccctcatgcctcccagtggatgccccactgtccaaagcaataccatggatatctgggatctgtccccactccagatagttcttctactgggttgaatgtgtgtggcacctctccatggcagcacctcccttcagtgcagccattcttcttcttcttctccaggtcgcccacatccttcaggatgaaagctgcagtgttggctgtggccctggtcttcctgacaggtgggtgcctcttggtctccatggactaactccctccctgggcacagagagaacagaattcccactgctctcctccaaggctccaagtctgacatgtcagctcaggccccagcccagagttgacctaacatgggtctcctctccatcctcaggttgccaagcttgggagttctggcagcaagatgagccccagtcccaatgggacagggtgaaggatttcgccactgtgtatgtggatgcagtcaaggacagcggcagagactatgtgtcccagtttgaatcctccactttgggcaaacagctgaagtaaggaaggacctagtgtgggtcctggagcagggcaagggctgcccatccagggtgggcagaggaaccctgtaagaatgatcctgtaactgagctggctagaccttcacctgctttcctaccagctgggcaccatggaggattccaatgggaggactagagatgggattcatctggttgtagggtaaccagcctgtggattcaaaatcccttttccttggtaacccccagtactggtcagacagcacaaaaaaaaaaaaaaaaaaaagacaaaaaaccaaaaccaacaacaacaacaaaaatgggactggccttgcaactggcaccaaccacatctgtgatcttggtgcctcaggccatgtgtacagagggatgggaagggaggaagggagttatagggagttatagagttcagggaaactaggagcatagcaactactattggaacaggtggcacctaggcctgaccccaggtatcatgtgcatggatctgcagaccaggggagtgcaggatgcctggggtcatctctcagctgctctcttcccctctagcctgaatctcctggacaactgggacactctgggttcaactgttggtcgcctacaggaacagctaggcccagtgactcaggagttctgggctaacctggagaaagaaacagattggctgagaaacgagatgaacaaggacctggagaatgtgaaacagaagatgcagccccacctggatgaattccaggagaagtggaacgaggaggtcgaggcctaccgccagaagctggagcctctgggcaccgagcttcacaaaaacgcgaaggagatgcaaaggcatctaaaggttgtggccgaggagtttcgagaccgcatgcgtgtgaatgcagacgcgctgcgcgcaaagtttgggctctacagcgatcagatgcgcgagaacctggcccagcgcctgaccgagatcaagaaccaccctaccctgatcgagtatcataccaaggccagcgaccacctgaagacacttggtgagaaagccaaacccgcgctggatgacctgggccagggcctgatgccggtgctggaagcctggaaggccaaaatcatgagtatgatcgatgaggccaaaaagaagctgaacgcttagtgaggcgcccgtcaccactccccacccctgaattggctttcttacaataaacgtttccaaagtggaatgacttctttctttgggtgacatagggaggacgctaaggggacatcaagggatatggaaagatggtgctgcggtgagggttcctttgtacggggctactcagctcttcaagctcactcaagctgggcacctggctggtttagagtatgagacacaa

SEQ ID NO: 783 - DNA, 924 bp, Rattus norvegicus (Norway rat); identical to SEQ ID NO: 681

SEQ ID NO: 784 - DNA, 1227 bp, Rattus norvegicus (Norway rat); identical to SEQ ID NO: 201

SEQ ID NO: 785 - DNA, 8048 bp, Rattus norvegicus (Norway rat); identical to SEQ ID NO: 223
  misc_feature (2005)..(2005): n
  misc_feature (3503)..(3503): n

SEQ ID NO: 786 - DNA, 1977 bp, Rattus norvegicus (Norway rat)
gtcctcctctgggacagggaaggatgtcacagctgagcctctcctggctgggactggggcctgaggtggccttcccatggcagaccctgctactgtttggagcctcctggatcctggcccaaattctgacccagatctacgctgcctataggaactttcgtcgcctccgtggcttccctcagccccccaaacggaactggcttatgggtcatgtgggcatggtcactcctacagagcagggcttgaaggaattgactcggttggtgggtacctacccccaaggctttttgatgtggattgggccaatggtccccgttattactctgtgccactctgacatcgtccgatctatcctcaatgcctcagctgccgttgcgctcaaggatgtgatattctacaccatcctcaagccttggctgggggatgggctcctggtgagtgctggtgacaagtggagccgccaccgccgcatgctgacacctgccttccacttcaacatcctgaaaccctatgtgaagattttcaacgacagcaccaacatcatgcacgccaagtggaaacggttgatttcagaaggcagttcccgtctggacatgtttgagcacgtcagcctcatgactctggacagtctgcagaaatgtgtcttcagctttgacagcaactgccaggagaagtccagtgaatatattgctgccatcctggagctcagtgccctagtggccaaaaggcaccagcagcctttgctgttcatggacctgctgtacaatctcacccctgatgggatgcgcttccataaggcctgcaacctggtgcatgaattcactgatgccgtcatccgggagcggcgccgcaccctcccagatcagggtttggatgagtttctcaagtctaaggccaagtccaagactttggatttcattgatgtgctgctcctgaccaaggatgaagatggaaaggagctgtcggatgaggacatcagagcagaggccgacaccttcatgtttgagggccatgacaccacagccagtgggctctcctggattctatacaacctggcgaacgacccagagtaccaggagcgctgccggcaggaagttcaggagcttctgagggaccgagatcctgaggagattgaatgggacgacctggcccagctgcccttcctgaccatgtgcatcaaggagagtctgcggctgcaccccccagtcacggtcatctcccgatgctgcacccaggacattctgctcccagatggcaggaccattcccaaaggtatcatctgccttatcagtatctttggaattcatcacaacccgtctgtgtggccggaccctgaggtctacaaccccttccgctttgaccctgaaaacatcaaagacagctcacctctggcatttattcccttctcggcggggcccaggaactgcataggtcagactttcgccatgagcgagatgaaggtggcgctggcactaacactgctgcgcttccgactcctaccggacgacaaggaaccgcgcaggcagccagagctgatcctgcgtgccgagggcggactgtggctgcgggtggagccgctgacggcgggcgcgcagtgacctcacagttggtctggagcacccccaccatcctacctctgaggatcccagaatgaacagaactgtcacccataccagaatcttacggagggccagcagggggcgctgtgaatccagtgagtgggtgagagaggccagttagtgtctgagccaaagacctttgacttcgtctaactgatcgccagcctttatcataaggtgcattcttctccaaccaacctggactattctctggacaataggaagccaaagaaacgtctgagcaagagaccagaatgaaacgcaaatttgagctcttattctcgcagcaaatcccttattcagctccatttccattattttgacctacattcaaatcatctaataaatacattctctc

SEQ ID NO: 787 - DNA, 602 bp, Rattus sp.; identical to SEQ ID NO: 683
  misc_feature (564)..(564): n

SEQ ID NO: 788 - DNA, 607 bp, Rattus sp.; identical to SEQ ID NO: 458

SEQ ID NO: 789 - DNA, 1000 bp, Rattus sp.; identical to SEQ ID NO: 493

SEQ ID NO: 790 - DNA, 6335 bp, Rattus norvegicus (Norway rat); identical to SEQ ID NO: 580

SEQ ID NO: 791 - DNA, 922 bp, Rattus rattus (black rat); identical to SEQ ID NO: 583

SEQ ID NO: 792 - DNA, 744 bp, Rattus rattus (black rat); identical to SEQ ID NO: 586

SEQ ID NO: 793 - DNA, 685 bp, Rattus norvegicus (Norway rat)
acgagtgctgacatgatcactctctgtgttcacaggaaagcacatttgtcttggcgaaggcattgcccgaaatgaattgttcctcttcttcaccaccatcctccagaacttctctgtgtcaagccatttggctcccaaggacattgacctcacgcccaaggagagtggcattggaaaaatacctccaacgtaccagatctgcttctcagctcggtgatccggctgaggcagccatgtgccccagttctgttgggaatggcctcatgtttctgcctctgggggacctgctgaaaaccaggctccaaggccactgctccacatcttcctattgcagttctccaaagtcccaaggctttttcttattcctgtgaatggcactgaagaagtcaatcggctgtcttattttgacatgtgacagagatttcatgagtccacatctcatgctgagttacttccctcttcctcctaacagcccatgtccccagttatcagccctccatggtctgtgatctgtgctaatggactctgtatatggtctcagtgctatgtctacagacttacatagtatgtatggttcaggtaaacagaatcacagagtgtgtgagcttcggagtcttgtgcctttacttcacataatattattctaggttcctgtgttctacaggccacagtcacacacattcat

SEQ ID NO: 794 - DNA, 654 bp, Rattus sp.; identical to SEQ ID NO: 30

SEQ ID NO: 795 - DNA, 1140 bp, Rattus norvegicus (Norway rat); identical to SEQ ID NO: 774

SEQ ID NO: 796 - DNA, 1884 bp, Rattus norvegicus (Norway rat); identical to SEQ ID NO: 693

SEQ ID NO: 797 - DNA, 4198 bp, Rattus norvegicus (Norway rat); identical to SEQ ID NO: 694

SEQ ID NO: 798 - DNA, 1234 bp, Rattus norvegicus (Norway rat)
ggggtagcttcttcagatccgtacagcctgctacaaaaatgggtactgcagaagatgtttttagaaaagatctgaagatcattcatggctaccccatggtctatgcttttgcactgggttgggaaaaaatcgaagagttccagagcagaccatgtgacattgtaatacccacttaccctaaatcaggtactacttggcttagtgaaattgtggacatggttctaaatgatggaaatgttgaaaaatgtaagcgagatgttattacctctaaagttccaatgttggaacaaaatgttcctggagcaagaagatcaggtgttgaactcttgaagaaaactccatcacctcgaattataaagacacatcttccaattgatctactcccaaaatccttctgggataacaagtgcaagatgatttaccttgctagaaatggcaaggatgttgctgtgtcctattatcattttgatctaatgaataatattcagcctcttcctggcacctgggaagaatatctggagaaattcctcgctggaaatgtggcctatggctcatggttcgatcatgttaagagttggtgggaaaagagggaagggcatcccatacttttcttatactatgaagacttgaaaaagaacccgaagaaagaaatcaagaagattgccaactttctagacaagaccttggatgaacataccttggaaaggatcgtccatcacacctcctttgaagtgatgaaggataaccccctggtcaattacacccatctgcccacagaaataatggatcacagcaagtccccattcatgagaaaaggtgttgttggtgactggaaaaattacttcacaatgacccaaagtgagaaatttgatgccatatataagaagaaattgtctggaacaacacttgagttctgcacagatattcagagtgcctaaacttcaacttgaatatatgatttcttgaaatagtagtttgacagggaaatcagatggatttgtgagggagaaataaatgtgcttttaaaacactgattaaatatgccctgcacatccctcagcaggaattattaataattccgaattatctagggacaaggtcttttgtgatcttagttttcaaagggtatgtcttcagattccaaagtgactactgaattaaataaataagttttttttaaaacactgattaaatatgccctgcacatccctcagcaggaattattaataattcc

SEQ ID NO: 799 - DNA, 1003 bp, Rattus norvegicus (Norway rat); identical to SEQ ID NO: 696

SEQ ID NO: 800 - DNA, 6849 bp, Rattus norvegicus (Norway rat); identical to SEQ ID NO: 717
  misc_feature (2293)..(2293): n

SEQ ID NO: 801 - DNA, 924 bp, Rattus norvegicus (Norway rat); identical to SEQ ID NO: 681

SEQ ID NO: 802 - DNA, 1444 bp, Rattus norvegicus (Norway rat); identical to SEQ ID NO: 628

SEQ ID NO: 803 - DNA, 959 bp, Rattus norvegicus (Norway rat); identical to SEQ ID NO: 698

SEQ ID NO: 804 - DNA, 1606 bp, Rattus norvegicus (Norway rat); identical to SEQ ID NO: 184

SEQ ID NO: 805 - DNA, 2638 bp, Rattus norvegicus (Norway rat); identical to SEQ ID NO: 209

SEQ ID NO: 806 - DNA, 2401 bp, Rattus norvegicus (Norway rat); identical to SEQ ID NO: 47

SEQ ID NO: 807 - DNA, 2495 bp, Rattus norvegicus (Norway rat); identical to SEQ ID NO: 700

SEQ ID NO: 808 - DNA, 8048 bp, Rattus norvegicus (Norway rat); identical to SEQ ID NO: 223
  misc_feature (2005)..(2005): n
  misc_feature (3503)..(3503): n

SEQ ID NO: 809 - DNA, 1228 bp, Rattus sp.
ctgtgattgataacggggagaagttttctggtagaggaagctatccaatgattgaaaatgttactaaaggttttggcattgtttttagcaatggaaacagatggaaagagatgagacgattcacaatcatgacctttcggaatttgggaattggaaaaaggaacattgaggaccgtgttcaagaggaagcacagtgcctagtggaagaactgaggaaaacaaaaggctcaccctgtgacccctccttgatcctgaactgtgctccatgcaatgtcatctgctccattactttccagaatcattttgattataaagataaggaaatgcttacgttcatggaaaaagtgaacgagaatctcaagattatgagctccccatggatgcaggtctgcaatagttttccttcactcattgactattttcctggaactcatcacaaaatagcaaaaaatattaattatatgaaaagctatttgttgaagaaaatagaagaacaccaggaatcattggatgttacaaaccctcgtgattttgttgattattacctgattaaacaaaaacaggcaaacaacatcgaacaatcagaatattcacatgaaaatctgacatgcagtatcatggatctcattggtgcagggacagagacaatgagcacaacattgagatatgctctcctgcttctgatgaagtacccacatgtcacagctaaagtccaggaagagattgaccgtgtgattggcagacatgcgagcccctgcatgcaggatagaaaacacatgccctacacagatgccatgattcatgaggtacagagattcattaactttgtcccgaccaacctgccccatgcagtgacctgtgacattaaattcaggaactacctcatcccgagaagggcaaaagtgttaacatcactgacatcagtgctgcatgacagcaaggagttccccaacccagagatgtttgtaccctggccatttctagatgagaatggaaactttaagaaaagtgactactttttgcctttctcagcaggaaaacgagcttgtgttggagagggcctggcccgcatgcagttgtttctattcttgacaaccattttacagaactttaacctgaaatctctggttcacccaaaggacattgatacgatggcagttctgaatggttttgcctctctgccacccacttaccagctctgcttcattccttcctgaatagatcaggc

SEQ ID NO: 810 - DNA, 1292 bp, Rattus norvegicus (Norway rat); identical to SEQ ID NO: 701

SEQ ID NO: 811 - DNA, 1780 bp, Rattus norvegicus (Norway rat); identical to SEQ ID NO: 746

SEQ ID NO: 812 - DNA, 1590 bp, Rattus norvegicus (Norway rat)
ggatctcagatggaggcgatggcaccgcgcacgctgctcctgctgctggcggccgccctggccccgacccagacccgcgcgggctcacactcgctgcggtatttctacaccgccgtgtcccggcccggcctcggggagccccggttcatcgctgtcggctacgtggacgacacggagttcgtgcgcttcgacagcgacgcggagaatccgaggatggagccgcgggcgcggtggatggagcgggaggggccggagtattgggagcagcagacacggatcgccaaggaatgggagcagatttaccgagtggacctgaggaccctgcgcggctactacaaccagagcgagggcggctctcacaccatccaggagatgtatggctgtgacgtggggtcggacgggagcctcctccgcggatataggcaggacgcctacgatggccgcgattacatcgccctgaacgaagacctgaagacgtggacggcggcggactttgcggcacagatcacccggaacaagtgggagcgggctcgttatgcagagagactcagggcctacctggagggcacgtgtgtggagtggctcagcagatacctggagctcgggaaggagacactgctgcgctcagatcccccagaggcacatgtgacccttcaccccagacctgaaggtgatgtcaccctgaggtgctgggccctgggcttctaccctgctgacatcaccctgacctggcagttgaatggggaggacctgacccaggacatggagcttgtggagaccaggcctgcaggggatggaaccttccagaagtgggcatctgtggtggtgcctcttgggaaggagcagaattacacatgccgtgtggagcatgaggggctgcctaagccactttcccagagatgggaaccttctccatcgactgactccaacatggaaaccactgtcatttatgtcatccttggagctgtggccatgattggagctgtggccatcataggagctatggtggctgttgtgaggaggaggaagagaaacacaggtgggaaaggaggagactacgcccctgctccaggcagggacagctcccagagctccgatgtgtctctcccagattgtaaagcatgaagacagctgcctggagtggactgagtgacagacgatgtgttcaggtctctcctgtgacatccagagccctcagttctctttagacaccagtgtctgaagttccctgtgattctatggcttcagtgtgaagaactgtggagcccagcctgccctgcacttcaggaccctgtcccttcactgcccgctttcccttccacattcagccttgctggtccagcctgggggtggagggtggggacatctgcatcctgtccccctgtgctaccctgagcttcagcccctcacttccaccctgagaataagaatctgagtgtgaacttgattgttcacatccttgacacaagtgtagatggctttttaaattactggattgagaatacttagaggttttttgttttgggttttgctttgtttgattttgtttttgaaaaaaataaatggcagatggagaagcttccaaaaaaa

SEQ ID NO: 813 - DNA, 451 bp, Rattus norvegicus (Norway rat)
tcctctttctctcgaaccgggcggcctcatccgcgaacagcgcagcaatggccaagattaaggctcgggacctgcgcggcaagaagaaggaggagctgttgaaacaactggatgatctgaaggtggaactgtcccagcttcgcgtggccaaagtgacaggcggcgccgcgtccaagctctccaagatacgagtcgtacgcaaatccatcgcccgtgtcctcactgtcattaatcagactcaaaaggaaaacctcaggaaattctacaagggaaagaagtacaagcccctggacctgcgacccaagaagacaagagccatgcgccgccggctcaccaagcatgaagagaagctgaagaccaagaagcagcagcggaaggagcggctgtacccactgcgcaagtacgcagtcaaggcctgagacgacgacaataacaataaagtccaaaactg

SEQ ID NO: 814 - DNA, 16299 bp, Rattus norvegicus (Norway rat)
  misc_feature (1292)..(1292): n
  misc_feature (1589)..(1589): n
  misc_feature (12941)..(12941): n
attcaattgatatagtcccgttgaagacacactttattcaacctctcaaaagtccaagacaataaagtctcaaaccaaaagaaatatgccaagtctcatataagcatgggcttggtagaatattattagagtctacagcagaaacttttcataaatggactaaactttccaagcgttaggttgactgaatggatttttttaatgaaattcaactgtatgctatctacaaaaaaaatctcacaagaaggtgctaagggatggaaagaaacccactgattccaggaaagcaaaacaagcaccagagagagcccttggcatcccaaggcatggactgcccgtgagactggcctacctagaaggagaagagcagcagtgcctagatgctttctagtctgaattagcaaccagccaccatccatttggcatggacaattcagaagaaactatgtaggtgctgggtctgctgtggaaactcaaggacctcacaagagcaacaaataaagccacagacataagctatgcagcttgggaaagagccagtgtgtgaggacccccatatcacacaagactttaacaagagatatttatttttatatgacaaccttgtttgatttttaataattaaatgtttcaagaaaagataaaaagattaatggatgaatatttaaggaaattatgattattctgcttaacttatatgtgcagtacccaggtgttgaaatatcacactgtatcctataagtgtatacgccaaatacaatgaaaaagggaaataaaagccaaacaagtcaatgttcttgactagcacaaagagaggaaaatgggtgcaggtctggctattagccactgtcggctggaaaaaaaaaaatcatgtctctgattcccaaggtaaatcattcctgccaactgaactttgagatcaagattggtctgcctcacctttctccctcccacaggtaggcgggcaatccttacaggatttaggcaagaggcagaaaggatctgtgagagtgagggcagctactgaggagtggctgcaccatgagcgtctctgcactgagctccacccgcttcacgggcagcatctctggcttcctccaagtggcctccgtgcttggtctgcttctgctgctggtcaaagcagtccagttctacctgcaaaggcaatggctactcaaggctttccagcagttcccatcacctcccttccactggttctttgggcacaaggtatgaaggaaagggaaggatgggtgggaaagcagggaagatgggtgtctcagagactggtnatcgaaatcacaggacaaagcctgatgtataaaaattccaagtacctcatgagatacccagctcaggctgaggcacaccatccaacgatagggttattcaaccagtctggctgttgctcaactctgtactgatagccccacactttgaaagctttagttggtcttacctagtctcctcctcttctggctgagtacctttaatatctctgctgttctcaaacaacttttaagtagttccttacctagtgagttacctaccgctattctctcccaagctcagggcttgccagggaatgnatcagtgagttgaaaatcttgcccctgtgggttcttggtagagcagtagtgcacatcttagaagataccaggcacaggaagggttcacattgctgggatcagtgggtggctgccccagactaggagtattttcaggattggtgaaggtccaaattgaaatcccaaagtcatggcacattaaaggaaaaggctggggagggtcctcagatgacagcactaatgttagaattcccacagggtcatttagctctcccttctccttcccacacaccctgcactgtaagctacttagattgaatttatttccttgtaccacagagttcagctcaagagccaggaacagattataaaattccctagaaagggatagcagcctgtaggctaggaaggctgtaggccactgacccattgcactgtcaccccagggaataatgtacagagccaatgaggctacatagaaaggcgttcaacaaaggattgtgcaatagatgctcttagaaagacctgggtatgcagtgttttgtgtgcagatctgagaatctgaccctgtggctcctctgaggaacacagctccaaccaccaggactctcgaatctccctcaggatcagccctcgtacagcaaagctatgagtaatagcacagataattcatcgaactgcctcaccctcctgacagcttcggaaaaatccaaaactatgttcctgtgtttggtctcctcttgtctccagtccaaaaaataatcaagagtcccactaccttctttttccctcaacagcagtttcaaggtgacaaagaactacagcaaattatgacatgtgtggagaatttcccaagtgcctttcctcgatggttctggggaagcaaagcctacttaattgtctatgaccctgactacatgaaggtgattctcgggcgatcaggtgagcgtgacacgctgttgtgaagacataagcacattcctccttggtacttgccctaggctgtcaaattccagaagagcgtgaccctccacactctaccattcttccagactacaacccagcacagggccaacaatactcagaactgaaaagtcaaatctcttagcctaatgtctttgtctttctttattatttattcaaattaagatggtaagtctagttaattgtttcaggtttgaaatctctaattgttacctgcctgactcatagaataacgaagccaccacaaacacaccaacacacacacacacacacacacacacacacacacacacacacacacacaccacttgttccattctttgactttgatctcatggactgtttctcaccagctcagcatctcagccatggaggagtccagctactagaacacgaatcctaaccttcctaagcctgaatgttaggacagagtttgaagggaatatgagaaattgggcagtgagttcagacagtttgccaacagacagcacttaaaacatcatagaaactcgtgcctttaaccacagttgccttggggctgccttttaatcccttttcttgttaagtcattgtttccctttcagatccaaaggccaatggcgtctacagattgctagctccttggatcggtatgtatgtctaagttgggaatgtggtctacttctaattggattttccgagtgctgtgcctctggttcacagagaataaatgtgacagactgccactatcatggtctacccccaaatctctacttctgacccttcacttctccaaacagtcctatctgaacatcagtgtgatctgcctccttctaactctttccgagttttatctcacagctctcataatcacagcatgtatgccagtgccgctagctgggaaattcacgttctggactgtagcattcttcagaattatctctaacacttcatagttccctgtccccaatttatttagtggtctctctgatttgatcacacatatacacacacctctctcctgcccaggatatggtttgctcttgctgaatggacaaccgtggttccagcaccggcgaatgctaaccccagccttccactatgacattctgaaaccctatgtaaaaaacatggctgactccattcgactgatgctagtgagttcatttaactttattctcctctattcccctcagctgtgctgttctttctacatcagctgcagctttggctactactactgccacagataccatagctgctgtggctgcggctgcttcttcttcttcttcttcttcttcttcttcttcttcttcttcttcttcttcttcttcttcttcttcttcttcatcgtcttcatctccttttttcttcttccttctctgcttatagtctcctctctcctcaatctctctcttcacctactcagtgtatgcatcaacaagctttacatatgtattctactttgaatacaggttcttcacatatagttaaaatagaaatattccaggtactaggatatggccatacttgcttattacccaaggcaaagagcatcagagcatcttctccttcttcaaatcttcaactttagagagacttcccaggatgacacttagttggggtttcccttgggtcttagtgcttctgcatggacttgagtcagagagatggactccagatccacattgtcagagccaaaccttccataccaccacctttcaacaggcctctgggttatgactgttttagttcattggagctagcttatagttcagaggttggtccattgccatcatagtggaaattatggtagaacacagacatatatggtgtgctagggaggtagctaagaattctatatcctgatgcaaaggcagcaggaagagagtgagacactagtgtgccttgagcatctgagttctcaaagccctaccccaatgaccacttcctccaacaagactacccctactctaacaaggccacacctcctaatggacctatgagggccgttttcattcaaaccaccaaccacattcctctccctgacccccataagcttgtagccatatcttaatgcagaaatacaatcagttcaacttcaaaagtcctcatagtctaccacagcactgttcaaaagttcaaagttcaaagtctaagagactcatgcaatctcttaactttaatcctctataaaatcaaaataaaaaaaacagattacatactcctgacatgtacgggatataccttacaatcccaaaatggagaaaaggcagcatggtgaagaaatactgaaccaaagcaagactggaaaaacgttggcaaactccaaactctgcatctcaatgtcttatgtcaaagtgctcttctgatttccaactcctttcagctttgttggctggttccactccctgttagcagctttgctcagcaaacaacccacggcatctccaacactgtaggcttccaaggcaattgtggcttcatcttcaagcttcacacagtaacctctttaagcctctatgcaagaacacccatcacacgtgcctggcttcagcagttttccttagacaaggagggcaatcccataatccattccttctttccttgactctaaaccagaaccatgtggccaaagctgccaagttctcatactcattcaattacatcttcaccagctggttttgatggtttcctttactgcctaagcttggctgtcctaaaactcaatctgtgtaacaggccagccttaaactttaagatccacaaacctctgcctcctgagcacttggatcaaaggtgtgcaccaccaggcctggccctgggcttttctttaattccttttcacttttctttaatttcttttccaaaattggaagtttatctgggtgggatcttggtctgaggtcaccgctccctttattccacttagcatcaagcttttctctaatctgtttatctccttcaacacaggccttagctacagtctacttcctggtgcctcctttctcctcaaagtatgcatttttgtattttttctctttctcagtttgctccttttcactgtagatttgcatgagcgaatactaataaccatacaacaaaatccatactaggcaattgtaagatatcctctgccaatgcagctaatccaactcttcaccttagccttaggcaaaccttttgaacaagggcaaaagcagccacattctttgccaaaatatcataagatatctacgccacatactaaaatttttctcctctgtaacctcttgagccaggaccccacaattcaaattaccctcagccccaccgtccttcaactactacagcccattaagccccacttaaatcattcaaatgcttttataatccaaagttccaaagtccacattactccaaacaaagcatggctaggtctatcgcagcaataccccattgctggtaccaacttctgtcttaattagggtctcattgctgtgaagagacactataaccacacaaccaattataaaggacaacatttcatggaagccagcttacagtttaaaggtttagtccattatcatgatgggaagcatggtagcacaaaggcatacatgatgctagagaggtagctgcgagttctacgtcatatccaaaggcagcaggaagagagtgaaacactgggtcaagcttgagcatctgagacctcaaagcctgccccgcagtaacgactttctccaacaaggtcacacctaatccaacaagtccacacctcctaatagtgctgcttcctagaggcctataggggctattttcattcatccacaataatgagtcaattgttctcagcaagcttttgatgaatacactggggacccccattagaaatgccttcgtggctacttgggtgtttttatactctatatgtagaagtcctaccattatctcaggttgagctgagctctccaatcactgatgtatcatctttttaatctcctaaaaacagaattgcttatcaggtaaaacatgttaactaactgcaaacatgtgaaacttgtttcctttcttatgagtttctatatttaattttgaagtaatttacaagaatataggtgtcctttcacaaagatttgttttgcagtctgtaaaacatctgttatcaaaattgagtaacttagaacatagtatcttacaatatagggaaacaattcagtctattgagcacatattttctagggaaattaagtcaatgttcccctcccactacaggacaaatgggaacagctggcaggtcaagactcctctatagaaatctttcaacatatctccttaatgaccctagacactgtcatgaagtgtgccttcagccacaatggcagtgttcaggtggatgggtgagtgacaacccttgatcttcagggcctttgatcttaccaactaatatggatttatctgtgatgcatgtgggacattttggatactcaataaagagtcttatcccagccccaagtcaatccctgacccaattgaatcctatcccaaccacagaccactgatccctagctgaggtggaatcctagacactcatgccaccttctaccaccttctaccttgaaaattacaagggttatgagacagagttatgtgcctcagtgttgtctcttcttatcatatagaaatctccccagagtccgtactatctgtgggttggagagctctacagtctaatctgttctacttcttcttcttcttcttcttcttcttcttcttcttcttcttcttcttcttcttcttcttcttcttcttcttcttcttcttcttcagaaattacaagagctatatccaggccattgggaacttgaatgacctctttcactcccgtgtgaggaacatctttcatcagaatgataccatctataatttttcttccaatggccacttgttcaaccgtgcttgtcaacttgcccatgatcacacaggttctgtttgtgccttctgtctccctcatttcctaagatcagctcaagggggctattgatgacttctgaggcagatccagacccttcagtgcatccccctataggacctgggtcacatccatgctagttacttttacactgacaatgttagcagttggaatgtcagaatgccaggtgttgaatgtatgtcatcatattggtaatgtgtagtgagacctgacccagcaactcaagcagagcttctattgcccatggtgctaagagagttctgacctgtgtcagatcacactggtcctctaaccctacccaatcctatatagcgcacccgcacatagcttcaggcaaggagacacatggagctacatggggttactgtagctctcaggtctttggaataattgatgttctggaatagatggtgtgatcaagctaaggaaggatcagctgcagaatgcgggagagctggaaaaggtcaagaagaaaagacgtttggattttctggacatcctcttacttgccagagtgagtatgtgcagcagaggcctgagagtctgcctgggaacacacaaggaacaagtatagttctgatgatgcctgttgtttccctcagatggagaatggggacagcttgtctgacaaggacctacgtgctgaggtggacacatttatgttcgagggtcatgacaccacagccagtggagtctcctggatcttctatgctctggccacacaccctgagcaccaacaaagatgcagagaggaagttcagagtgtcctgggggatgggtcctccattacctggtaagagttcaagtagaagtgcccttattctttgggtctccagtctacctgacctccacattggactttatttcagggatcacctggaccagattccctacaccaccatgtgtatcaaggaggccctgaggctttacccacctgttccaggcattgtcagagaactcagcacatctgtcaccttccctgatgggcgctctttacccaagggtatgaatttcccaggcctttcatcctagagagaatggatgctcagtagtctgtgtccttcaacagttctgaatccctctgagtgccgtttccttttcagtaaataaatgcttcttactcataaagtacagtaataagcttaaatgacctcctataaagttaaatgctactttgcatgaatgacattgaaagcattcttcatcagctaacattccttcttcttttgaatctatgatctcatcatgaagcatccattctaatttgggaacaatgatgttttccagactcaattccagatgccagcaccatataactcatagccacacttattcttcagatgtcctcactgtcacatatgttttcatgttggggctggaaacacaggcatatgtttgtacatagaagtgggaggcagaggtcagcattagttgtcattccacaggcactgtccaccatgatttttcagttcaggaggtcttgtactggactgtagctcatctcttaggctaggctggccactgagctaggaacctgcctgtccccacctcaccagcagtgggataacaagcatgtgccaccacacacagtcttttttatatggattgaggtctttctctcaatccccaatcttttatcatgttctacatttgatataatgtgtagacatttttataaaaaactactatttatatatagatcagtaaataaaatgtgacctcagattcttgccaaggcaagtaaccggttactctccataacctgatagtcagaccctattgctgaagacacaacttatgtcatcaaacacagagaaaatgatctggtgcccaactagatttagacctaattattaacccaaatagtgaatagggtctctttttcaagcttatttcactaatagttttacattatacatttatacatatatttatattatacaggcacagaacacacacacaagggtggggagagagagagagacagagacagaggcagagacagagagacagtgacaaagacagagagagagagacagagttttcaaaaataaaaagagcaaatcaggcaaatttaaacagaagaggaagagttttttcttgcagagctccttggaatcttcaatgtgtctatctagatgtctgtgaaggaaataaggaacagagtttcctcacgccctgatgattgacatcttgtctctagcgtacattggaagtggagccccacagttcttttctgctgaccttttgctgtggcttggtatttgtttcctgccaaactcatacagctatgtaatacccagagtcacacgttaatggggttgggagggtgaaagctttgtgaatttatgttaatcatggtggtgctctaaattgtactgaaggcctcctgtttgctaagcatgtgctctaggactgagccacttaccatccccaagatgagatggataaacttggcttgactacgtgctttagagcacctgggagtggatagattacattagggttggtctcacattattctatatagtggctttagaaagagaaggagggagactgctaagatatacacctgtcctcaccatgataggatgcaaccaagggagagagctgtttgaactttcagctccaaatctgagctaaataagcttcatatatacatatatatacatacatacatatatacagacatacatacatacatacatacatacatacatacatacatacatacatacatacatacactgggatgtacagggtagatagagaatcagacaggggctagaggaatgtgtttcttttatgagacaaagcaagtaaaaaagagcaatgaattccatgccgtgagtcatatgtggtccagtctctgagaaggcacttgggttagtgacagagatgaactgatcaccaaatacaagacccctgcaatgtcaggaaagcaccctttgtctcacagctcattatggcaaaactctagtattgccacatcctgctttggtgatatgtaacccctctctgaaattttagtaactcacctgaaaaaaaaaacagaataaatcaactcactctggggacttaatatcttaatatcttaacatctttagtggaaatccttcatcaaatttaagttctaactttatttattcccaaaaccggttcatcttttttgcttctctctctctaattccatttttttatacttctcacttgtgcctcaggtttgtttccaactcatgcacatgtgctgaaagtgatggtctatagcaccctaacctcttgtgcaaacgtatcattccctgctgtctcaggaaccaaggagtcacccctgggtgtaacccatcttctctcacatttctatctgccccacaggtatccaagtcacactctccatttatggtctccaccacaacccgaaggtgtggccaaacccagaggtaggaggttcccccaaggagggcagaggagttggtctcaagatcaataccacctattgtccccacctctaggcacattgtccattgtgagttgcaagcaagggtttgacctctatctatcctgactgaagtgctgtctccctgcaggtgtttgacccttccaggtttgcaccagactctccccgacacagccactcattcctgcccttctcaggaggagcgaggtgagatagcctgtgtatgatgattgatatactgtaaagatctttgcagcattccttggttttatctcatgcatatatggcatcttcgggtatatcctgattgggggtgggggggagaagcttcttgaggatgtgtctgtgcaccaaaggagggtggcatttcatgacacactgtgaagacattaacccattggccaaacaaatttctatgcagtgcatgcacttgcttgtgttctgatgtttccctcactttaagggcaggactttacattgatttttttcacatgactttaacttcaggtgtccagcttgtccaatttgggggctcttaaagggcatgtcttttccacacctctatctgacccatcactattcctgcgtagttctctattctagaatcactgtgcaaggaattaatttgcttgcatgtctgccacattcaactgtccagtgaagtattacatcatttgaggcaaggttcacaccagggtatgctaattccacctttgctctctctctcccaacacaattttcaatccgtgttgatgctcacatctctcttgcaattgcccaatggccaaagcttgacagataatgtatattcctcaagtgaggctatgtagtctaacttcagacaaaaggcattaaaaagaaggagagtaatctgctctgaagtaaacctctattttacatataacagcatttttaaggtttctgggagtgaaatagaagacactcttgaaatagctactgaactggacaaagactttcccatggcttctagggaaatccttccacgggacctaactcactgcaaactttaaaaggtggtgcagaagaaggattttctgagcctatttttcatgaattcatgaagtggcaaatcagttttcacagaacaggctagaagtaagttgttcttccagacacaggctatgtccacacacttggcaaacttcaggattgaatgcactcaccgcaaatcatgccactgccactagaagacaggagagtattgtcttaactcagtagtaactcagcttaactcaccgagccatgctgctggtggtgtttgctaagacagagtctcaggcttgtctggagctcatggtccctctacctctgcctcccaagtgttgggattcagacacagtcccccatggcttgctttggtcagaagctttttcatctttattatatttcgttctattttttttcatcccttaaatccacatgaattacattttaagaaccaaggaaaggtaactattttaactgcaaaataaattttaaacaactcctgtgtgtccggtgctatgctataaaaatatagaaataatgatactatcccattcctgcctctaagagttcaaaactgtggcccacaaagacaaatatatctgtgattaaaatatattcttcccccattctttcactcatccactcagcagtttgcagaatgttccatgttcctggcatcatcccacgccctgagggtggcatggccttgaatatggtatagatggtgccttgaggcctagaaggagcagggtcagtcatcgaagaaataagagccaatcactcattgacctgagcttaggggatatgaaggaaggggtggtcctcaaatacctcaacagcttgatcttaagtaggaagtgggatgggcaggaaagaggtgagggcagcagccagtagagggtataactgcagctagacctttgttgttttgttttgtttaattttatatttttatttattcactttacattctacngccttccttccagtcacccctcccacaattctcccccctttcccctcccctcttcccctcctctgagcagatggaggcctccagagtgccgccaccccccacccccccaacccccccaccctgtgtacttcaagtctctatgagactcggcacttcctctcccactgaggccagacaaggcagcccagttagaagaacacatctcacatacagacaacagaaaagctaaacaagaagaaaagcctaagtaaggaagctcaaatctcacttagaagaggaaataaaagtcataagaggcagatggagggagagaactgggaggaagagaaggagaggagggggtgggggtttaggatcaggtatggggaaggacaggagagatggccggatggccatgaaaattaatggaaatctgcaactgatgggggtgggggaagcatctccaggaggagacagagacctgggataagggaggagcccaaaaatcaatgggggtgaccttagctgtgactcactacactggagatatggaacctgaagaggcaactaggcattgaacacagccctacctggtggaggtatagaggatcagtgtggagggagggccagggagaccaaagaagcccaggaaaggaaactgaagaaggaatagtgtacatttctgaagtagagttggaaagctatagaggccgatggattaaggatgtggggtaccctaagtaggaggcagatggggcagacacttgaagatcctcaacacagtcttcctgtaggtcctcttctactgatacccaattccactctgtgaaagctatatgctagatcttcctgaatgaagtaaacgattaacttattaaatgattcacaagtttgacttctagtccttaaaatactgtcctaacagatttcatacgtctaaaacaagaaaaactaggatcaaggtggcattgaaaaatgttgaggctatgtcaaaaagtcaggagagccaagtaggcatgacccgtcatctcagccattaaactgaacctgtgacagtaggccctgagtgttgttctgggatccttcacgggtcagcccttaaaacaggtaagaagctaatgagttttattttccctttctgacccaggaactgcattgggaaacaatttgctatgagtgagatgaaggtgattgtggccctgaccctgctccgctttgagctactgccagatcccaccaaggtccccatccccttaccacgacttgtgctgaagtccaaaaatgggatctacctgtatctcaagaagctccactaattccggtaaggacaaggacagactctatgaacatgtggcctggcaccttgtcccctgtcatcccttcctgtcaccatcttgctttctgtctgttcatcctcacacctatttgctccctggcctcttggtctcctcctctctctctctctctctctctctctctctctctctctctctctctctctctctcctctagattccccatttgttttttggtctcctgctacccacatctgactgtgcacctgatcctgaacatccttcatcctccatccttctctccttgcctcttcacttcttaccatctttttcccctacaggacttcttcattataccaataatcaacggtcacaaccttgatggtcgggaataacaggacgttattatcttacagttgtggagctccgaaatctgaaatgagtttcactggcagaaagctgagttggtggtgtgactagccttcttcagaagagtgcttcagagagtcctctcctcctctcttcagtacagatcacccttctcagcactggaatattcctctgctttaaagccagcacccttcccataccccctcttctaaaagccttcccttttacaaatgttcttatgacatcatcaagaccactgaaaaactccaagataatttcccatctcaatattccttactccatctaacctactaagtcccttttgaattatgaggaataattcaatttgttccatgggctccaaaactcaaggcctgagcattattgtgaaacctttattcagcctaatatcatcttcacaagactgttacctggtacgttcatctaaatctcccctgcatagtctctctacctgactattcctcacacaagtttctttaccttccctcctttctccaataaagtgtccagtgtcctgcacagcatctgtcttctcatgctggctctgaacacaggttcccattctgtttgaaactgctcctggatcaggatccatgatgagttctctgccttccctgagatgccatgctctgctttctcacacacacacatacactcacacatacacacacaacacatacacacacactcacacacacacatacacacacactcacacacactcacacgtacacacacaacacatacacacacactcacacacacacatacacacacacactcacacacactcacacgtacacacacaacacatacacacacaacacatacacacacacacacacacacatgcacacatcagagttcttggatttattcaaatactcatgaagaactggtattaataatggtgtcttgattagaagacaccagagtcaggaagcttcagctcaagttccttctagattagtgttccgccggttccttcctttaatatttaaattcagtcacagcctcctcctatcagagagggggtacctccacccagtctacactacccgagtgccaaggtgctgaagaaacaaatgttacagtttagactcaggcaccacccagtgacgcatgatggttatgactggagaatcagcgcccacgtcataactgttgaaatcttgctacatctgttcagagaacagtttatctgtgtgctagggcaaaagggcaagttagttgcattaaggcttctagctaacaggcacactataatgggaccttaacatcccagcttcgagtgtacagggagggctttacaggagttagcaagtatcttagggcagagcttccaagctgtggacttcttccaagcagaaaagaattggtagtaggaaaggtatatggcacatttcccaagatgccctagagtggtggttctgaaccttcccaacgctttgaccttttaatacagttcctcatgttggggtgactcccccacccccacccccaaccataaaattaactcattactactttataagtgtaacttcgcaaagaacataatataaaatctgtgctttctggttattgttggtggctcctgtgaaagagtcattcaactaccaaaggggtcatgagccacaggtaaagccactgccctagtcccagggctagaattc

SEQ ID NO: 815 - DNA, 560 bp, Rattus sp.; identical to SEQ ID NO: 752

SEQ ID NO: 816 - DNA, 400 bp, Rattus norvegicus (Norway rat); identical to SEQ ID NO: 703

SEQ ID NO: 817 - DNA, 406 bp, Rattus norvegicus (Norway rat)
tttttttttttttttttgtggttcacactttattgcaaatcaaatgggtccttcctggggaccagggcagcacagtgagatctaatctctcaggccaggctggggattcaggggtctggtacagtcctccgaaaatcagtgagggaagggttggatgcagggcagagacaagggagggggtaatttgcgcgcctgctgccttccttggatgtggtagccgtttctcaggctccctctccggaatcgaaccctgattccccgtcacccgtggtcaccatggtaggcacggcgactaccatcgaaagttgatagggcagacgttcgaatgggtcgtcgccgccacggagggcgtgcgatcggcccgaggttatctagagtcaccaaagccgccggcgcccgacccacg

SEQ ID NO: 818 - DNA, 664 bp, Rattus sp.; identical to SEQ ID NO: 707

SEQ ID NO: 819 - DNA, 536 bp, Rattus sp.; identical to SEQ ID NO: 708

SEQ ID NO: 820 - DNA, 333 bp, Rattus norvegicus (Norway rat)
tttttttttttttttttggagtctaaacttttattggtccctcagtccccaaggggttcccttcttctgagccttagtgcctcagaactctggtatcattggtctcggacaccactttgccatccacgaccttacgggtagttgtcctctggacagtttgcatggagttgctggagtccagggcgtcgttgagactgaaatcgtccccatcctccaacaagcggcggtaggtggcaatctccgcctcaagcttgaccttgatgttcaacagggcttcgtattcctgggtctggcgctgtccttctgcccgagtttgtgccagctctgattcca

SEQ ID NO: 821 - DNA, 405 bp, Rattus sp.; identical to SEQ ID NO: 674

SEQ ID NO: 822 - DNA, 613 bp, Rattus sp.; identical to SEQ ID NO: 710

SEQ ID NO: 823 - DNA, 638 bp, Rattus sp.
gaatttatagagttgatattacctttattttatttaatgttacattaggcatcattgtttcattctgtatgaggtaaaattgatacaactgtgtgcttaaatccatagttacaatcaagttcacaactgcaggctacaaagtggtttgtgacatttattacaattacatttttactgtgcaagtgttgcaagaatttctcatggtgaggtgtaccccaaaatttgtgtatctctggaaaggggctcatagaaatttgtgggtagggctcacagaaatatcaggcaggactgttccaagacccttcaccaggcctcaggagttcctagttgcttacaaataggtccctgttatatgaccgtaatgaaagaaattccatgatcctccttcctggattcccaagcagaagtggagtccaagatgatttgtcatagtatacctcatctttgcgcagaactgtgcctttgatgatctccagggcgcattcctccttgggagcagcttgactcaagattatcccagaggtttctttcaaagctgtttctgtgtctatgaagccgaggacacagagagtgatggacacgttgaccttggtcatcaagtgttcttttctaatggtggaaaagaacccatccagagc

SEQ ID NO: 824 - DNA, 465 bp, Rattus sp.; identical to SEQ ID NO: 711

SEQ ID NO: 825 - DNA, 1000 bp, Rattus sp.; identical to SEQ ID NO: 493

SEQ ID NO: 826 - DNA, 3237 bp, Rattus norvegicus (Norway rat)
cggggatggggagagttcacccgtggcagaggaatcaacaaagaggggccagggctaaaactcagttttcaccccagaagctgagcctcttaacagatagagccccccacctatttccatttaagcctccagcccttttccgtacaacgaatgcaccagaccccgcgggaaaggggagaagcagtactcagtgccccagcaccaaggcctggattattcaatgaggagtcagctcctttttggggggggggggtcacaaggcatcaaaactccacctctttcctctgccctgctgtgaagggggggggagagcaacccgcctcgtgacagggggttggcccagcccgccctagccctgaggagggggcgggcaggggggagtcctataattggacaggtctgggatccggtcccctgctcagaccccggaggctaaggagttgtttcggaaggagctggtaagacaagcttgggctggcgattcacccagggggcttggtaagacgtgggcaggggaccttgaaatccgctggagtccaggaaacaggcacaattattagaaaagcaggaagcccgatagaagacttagggtggcggggagacaaactaagatcgtgaggtaactagcctttgccggggtcagaacagatggaggagatggaggggtcatctccaggagtactgtcggtgcacggcatacgggctcaactagaaggtagtatcaatctttagcgaaggacccgcgatgagccttaggttgcgtttatgtaaatacctactgatttccatcacagtccccaaaattaccctggccagtttcaaagcgaagaccctcatgcctgagcgtccgaagttctggggtcgcgggagggtaccacttcgcagggatggaggacgattaaaagcttacattagtactaaaccgagagcccggcttagcagggaaggtagaaaggaatgtaaattggaccaccggctgtccctctgcgttgtggaatttgaaccctaggactgggagctggaatttttggcagcgggtccaccccggggtgctgagatagagataggagggggaggtaaatagacctttgggcagatgctctattgtggagatgtttgtgatgactcacagacctgagaagggaattaaggtgggggctctttgggtggcccgagtttctccacccctacccactggtgttcaaagacagcttttccttccgcagactggccaatcacaactgggaagatgaaggctctgtgggccctgctgttggtcccattgctgacaggtatggggcaaggggtggctttccctgctggcaggttggggttggggcagttctgagacctctgagattcaatagccctgagcagctgttttacatgcaggccttgtctttccctatccataatatgagaggattgatgctcagagggtaaaggtgcttgtcataaagctcgaagacttatctcggagcccaacatggtggaaggagagagcggattctctctagttgtcctctgacctccaagggtacacacacagacacacaattaaaaagttgaagtgtgtaatttcttagtcgcttttaaaggggaggtatacattttctaaccccataccagcctagtctcagctctgttctacataggatactagacagtgtatgcttgtagtatctaaacagactccacgactgacttccagacgcactgttgcttcaaagagacccaagagcactgtaggtcctgacccagccttaaacttactactctacacaggatgcctggccgagggagagctggaggtgacagatcagctcccagggcaaagcgaccaaccctgggagcaggccctgaaccgcttctgggattacctgcgctgggtgcagacgctttctgaccaggtccaggaagagctgcagagctcccaagtcacacaggaactgacgtgagtgctcagcgcttcaccctccgcacctgctgagtatccagatccaggggttcctcctatctgggcacctacctacttcttgtttcctttctccatgagtgtgtgggccaggttggcttgaactctcaatacttctgctttctttagccttctggatactgggatgaacaggcattcatttatgttcttggtcgaatggcttttggctttttgagacaggatcccaatctaacttaagctggcttcgaaggctctgcaattctccttcctcagcttctcaacttctgggaatacaagcgagtaccaccgcacctcgctctgtggtttcctcccaccctaattctgacctttttgtctctgcattcatctccctcttgtgtttcctctgggcctgcagggtactgatggaggacactatgactgaagtaaaggcatacaaaaaggagctggaggaacagctgggcccagtggcggaggagacacgggccaggctgactaaagaggtgcaggcggcacaggcccgtctgggagctgacatggaggatctacgcaaccgactcgggcagtaccgcaacgaggtaaacaccatgctgggccagagcacagaggagctgcggtcgcgcctctccacacacctgcgcaagatgcgcaagcgcctgatgcgggatgcggatgatctgcagaagcgcctagcggtgtacaaggccggggcacaggagggcgccgagcgcggtgtgagtgctatccgtgagcgcctggggccactggtggagcagggtcgtcagcgcacagccaacctgcgctggcgccgcccagccccgcgcgatcgcgcccaggctttgagtgaccgcatccgagggcggctggaggaagtgggcaaccaggcccgagaccgcctagaggaggtgcgtgagcagatggaggaggtgcgctccaagatggaggagcagacccagcagatacgcctgcaggccgagatcttccaggcccgcatcaagggctggttcgagccgctagtggaagacatgcagcgccagtgggcaaacctaatggagaagatacaggcctctgtggctaccaactccattgcctccaccacagtgcccctggagaatcaatgatcatccctcacctacgccctgccgcaacatccatgaccagctaggtggccctgtcccaagcaccactctggccctctggtggcccttgcttaataaagattctccaagcacgttctgagtctctgtgagtgattccacacagcttcagcctcagtttat

SEQ ID NO: 827 - DNA, 1840 bp, Rattus norvegicus (Norway rat); identical to SEQ ID NO: 713

SEQ ID NO: 828 - DNA, 9176 bp, Rattus norvegicus (Norway rat)
aagcttcgcatgcctgagctgctctgtttgcaacagaggaaggtactcatgctagttcgctcaatgaggacctgtaacatttagagagactataaaaacaagtaaaatatttccatgtttaagtttctgatctactggaagagacagatcatgcctcctacaatgataaataccacaagtaatagctgatgcaagaaaagatagagaaactagggaacatttatttcaggaatccaaccaggagcatgcagaatgtccagcaaatatttgggtgctcaataagctgttggtgaccactgttactaggaggggcttcacataggaagcagaatttcagagaaagtaggactggttgccaggtaacagaatatcctgttaagtctgaattccacatgtacaacaacattctagtacaagtatattcagaacatcacaaaagacatgcacgctataagttgtattggttttctgtctgcaattccaatttaactggtcatcctcagcttttactactagtcatagcacacttaagtcacaggcttcttttatgtcactgaatcatgactgatacgtaaatgtcctatatgtttgatgtgaaataacccaagctcattagcacatgtatcacctcatttaattatcttttcctttttcttcctttttgtttccctggtttctcatctcctagcaaccactactgtgctcaaccactactgtgtcccaatctcttgagttacacacttaaggtttcacatggaagtgaaatcacatctttcgcttagcgtgaggtcctcaaggttcctgcatatttccccaaatgcttgattttcttctttccacagcctgaacaatgatctcttgtatctgcccttctgctttatccattcatccattgcattaggctgcttccattgtgtgggattgtgaataatacatcaatattctcttcaaagtccagctgttgcttttgggggccggggggtatagaagtgggtgggtggctggcacgaaagtttcactgcgttcagaagaattgtacaaggaaaggaagagcagaggtcaggcccagaggcacaagaggaaagaaagcacattctccatgacacttctccaatcatggccagcacttactcccaggtgttggtgacaatcattccccaaaggccttgaaatagctctcccatttgtttaccaacatgtgtaggatgttgttttcgcccctgttccttaaatgaggagactgattcacaaggatgagcaggtgaccttcataagtgcacagaaccaggaagctggacctaggattgttggtgtttggcgccatcggttactgtcttgacctttgggtagaggaaaataatctgttaacataaatggcttttaggtcattttgaaattcagatgagctctgaatcctacacctagtctaatgtctaatgtctctgcttcaagaagtgatagccagaatcctctgtcagtcctcatacttcttcagatgtgaaagtgttcatctttgtagcttcaaaggccccacttcctggaatgtagaatctccccgcccacaaatgctgtctacacaatcaaatgctaccatttgcaacaacttatcggaaacaaacaagctacagagaattgagcaagaatttctgggatgccgtggttattatggtcagagcaaaggacacactgtgagctttggctatctgagtaggacaagggtgatgattaacctagtttcctgcaggtttaagtaggataggagcagtgagtgaagtcagtcctccttcccttcagcttcggtgcttcccatgagccatccctgcaatcagaaactatgctttccctgagggtcgcctgcctcatcctgagcttggccagcacagtctgggtatgtgctttctcttctcctcactctctgttatttcttcctcgaggagttttgatttcagagactaccagtcttttgttcttagcattataaatgccagaccaggaggcaaattcctaggtaagcctgacaagtctagggggatgtgacttccagagggaggccctaggggaacaaggcatcttgacacctgtcattcaggccgattcagattcagtctttcaacactgcaggtgtgtttgttagcataatttctcggtgctgggacttgatcatgttgtgatgacctgcaaccataaaattatttttgttactacttcataactttaattttgttacttttatgaaccatattgccaaatattttgggggataaagggttgccacaggggtcatgacccccaggttgagaaccactgggcatgccagtaaatccctctacaactgagctatagtgacagatttccagcctcatgaatccccaccaccaccaccacatctttgtccctctaccctctggagacatcattctaacagaacaaaacatttgataagaactgatctctagctggtaattccagacatttgtctttgatgagcagggtttagtatgatttacctctaggttttgctttatctgtaaacgttttagttttgtttgtaatattgaggactgaagcagaactttctgaagtgctgaccaagcattctacacctgcagccctaagaagaacttgttatatctttttgaagacataaaaggaaaagggcaaattaattgcctttgaaaacatatagcaaattccaaagaaatttgtcatgaggcagtgaggaaggatttgtgttccttttagataacttgtaaatactgacatcttttccaaaattaagctccaaagacaacaaaagaaagaaacctaaattaatggagcttctgaaacattttaatgtataaaatgtgtcaactatgaccaaggacctaagagatatcctaattcgttacccaggctgtgtattattgtattatttcagttgtttttgttggtgagttttttttttttgctttccattcaaaaattttgatatcaagagtaaaaaataacatatttttgagggaattaaacctaaataaccagctgaggcgatatttctggataatttttccttttattgtcttccttatctcttcttattatgtgcactttctgtttgctctattcttgtactatttcattcatacaattgcattttccattatgcttcttatacaaaagggctctacttgttctttttaaataaattgttctctgctgctttaactatgctaattaagattatttgaattttcacaaacaagaatgagattgtgttgataattataaggatgaactatcccacactaacatagtgacaggaaacctgtaagttggcagtgctgagtgaggcatgaagacctcgaaccaatcgaagccaagcattcccatcccttagactaggaagtcttatgggacacaatgtttgtatttcatttggtttatagctgagaacttttagctttgggtttctaattataaggtgtttaaaaaattgctggttgctgactactgtttcaactgttcattattttcatttcaaatgaaaatcttcagttgcatgattgtcctgcaaagcattgccaagttttaactttccacatttgtatacttgataagtgcttgtctgaatcatggaccgtctccaaaggttaccatagaaacctgaaggagaaaggagcatgggcaccaagagggcatagattttcgaatacacagagaggtcttaggagaaaaaactagactttttcagctaacttgtctatggtcatgaaagaaaagtcaacagtgaaatttaattgatgctgttaatcgggataatttttcttttaaaacccctaacatctagcagatgcttatctagagtcaaatcctgttttacaaattcagcctttacagcagcattggctgttaatgtctgtcatttctcctctgggcttttgagcatgacaatgtctcttctgctggctaaccttgttgcctttgctcctttttgaatatttgagaccccttaaagactgcagacaccggcaccacaagtgaattcatagaagcaggaggagatattcgtggcccaagaattgtggagagacagcctagtcaatgcaaggagacagattggcccttctgctctgatgaagactgggtaagcaggggacatgttgatcaggggtccttccttatgtcactgtctgtctgtctgtctgtctgtctgtctgtctatctatgtatctatctatctgtcctataatataaataatatgttaacatattatttgcacacacacatatacatatatttgtttcaaggaggattgttagttatgttgggtctgtcatgggataaacacatgggatgcctgagtagtgggactacaaaattcccagagcatcatgcaagactaagtggaatgtcatttcagaatttccctatggcctgttaactaccttttgagtctgtggttacttggaagagcctggggaggagaagccagccaagggctatgataacattgcccaaccttcctagtagctgaaaggcagacccttcataagatctctcccttcattttcagaaccacaaatgcccttcaggctgcaggatgaaagggttgattgatgaagccaatcaggactttacaaacagaatcaacaagctcaaaaactcactatttgattttcaaaagaacaacaaggattctaattcactgaccaggaatatcatggagtatttgagaggggacttcgctaacgccaacagtaagtgggacatatttagtgcttggactttctaacaaggatggcaacacaattctccagttgagaatgtcttcttgcagatgctgcagttgacttgagcactcgtgtggaaatcattgaatttaagagagaatgtcatttcacaaagttagaaattagcttatatttttaatgttccatatttttcaaacaaagagagggggcacctttcaagtagctattctgcttttatcctacagactaagagtctcagaggtcaagggacttgtcaatgacacaaaatagaggtcaggtacacgttctactgagtcaattacgtctccctacctaccccacccctggactcaccaggtctggggcacactgtggtcactctgggaataaagagcaagtccattgaagtcccagttcttgagcccttgtctgccttattctgtctctctgagacctcaacagtttatgtcaatggtacaacagtagttggcaggtaagggattttgttaacacccaaaagcttagaaaggatttcaaagttcaggtagaaagaaaaactccttggaaaatataagcaataatacattgaagtcccataaatgaagttataatcaaataatcagatgtgattaaactatttaccttctacagttttcaagccctcaagtaatttctggatttatttggattccttgtcatgttagagacagcgtgactaagacccatggatgactcttgtgtggaacaatctaatttaaccggaaacttgcagattagacatccagagaacaaaccacagtagaatgaagaatacgtgtggaaatacttacaagcaacttcctttttcacttttatttatttatttatttatttatttatttatttatttattgtttattttttaattttatgagcaaatcagtctgcagctacccaaataccttgcattttctgtttcagactttgataacactttcgggcaagtgtcagaggacctgaggcgcagaattcagatcctaaagcgcaaagtcatagagaaagcgcaacagattcaggttctgcagaaagacgtccgggatcagctgatagacatgaagcgcctggaggtaagcctgaggcccgggccccaatttgtctttgactaagaaaaaaggaaaaggaacactctagccgctacggaacgtctcctaaatccattatccacccaaaatagaagtgtctccaccctagagaagaagacagaagtccagaaatgtgaaggaaattcttgaagggtcaattgtgtatttgaaaagaacaggggctggggatttagctcagtggtagagcgcttacctaggaagcgcaaggccctgggttcgatccccagctccgaaaaaaagaaccaaaaaaaaaaaaaagaaaagaaaaaaaaaagaaaagaacatagtctgatcggtctgctcaccacatgccgagaccttggccttagcatcacctaggctcttcaggcagggctaacagtaagattagtgccttcctccttcccattccaattctaaaatggatccaaatagctcccattgcacagcggcctccttggcctccacagcttccagtgaggatggcatgagtggcgaaagacaacgggtaggatagatttttctgagagtcaaagaaataaaacccatgcccaaaatgcaaaccaaccaccaggaactcaattatttcaatagatagaattcatttccctgtcttcctctctttaggtggacattgatatcaagatccgctcttgcaaaggatcctgcagcaggtctgtaagccgtgagataaatctaaaggactacgaaggtcagcaaaagcaacttgaacaggtcattgctaaagacttgcttccggcaaaagacaggcagtacttgccagcaataaaaatgtctccagttcccgacttggttcccggaagttttaagagccagcttcaggaggggcccccagagtggaaggcattaacagaaatgaggcagatgagaatggagctggagaggcccgggaaggatggggcttcgcgaggagatttaccaggagattcgcgaggagactctgcaacacgtggaccagggtcgaagatagaaaaccccatgacccctggacatggtgggtctgggtattggcgtcctgggagctccggatctggaagtgatggaaattggggctctgggacaacggggtctgatgacactggaacctggggtgcaggaagctccagacctagctcaggctctgggaaccttaagcctagcaaccctgactggggtgagttttcagagtttggagggagtagcagcccagcgacaagaaaagagtatcacacaggaaaactggtcacttctaaaggagataaagagctcctcattggaaacgagaaagttacctctactggcacaagcaccacacgtcgttcatgctctaaaaccattactaagactgttttgggtaatgatggtcaccgggaagtggtcaaagaagtggtcacttcggatgatggttctgactgcggtgatggcatggacttaggcctgacccacagttttagtggcagacttgacgaactttcccgaatgcatcctgaacttggttccttttatgacagccgctttggttcactcacaagtaacttcaaagaatttggcagtaagacctctgattctgacatcttcacagacatcgagaaccctagctcccatgtacctgagttttcttccagtagtaaaacctcaactgtcaggaaacaagtaaccaagagctataaaatggcagatgaggcagcaagtgaagctcaccaagaaggagacactcgaaccaccaagaggggccgagctcgcacaatgagaggtatccacgcttaactctgggaagttgccctgaccccctagactaagttaaccatttctgcaaagtgcttaccaggcacgctctttcttaacctcttctagtgctttggtggaatctcattttttttcatgctagactgtacgttccttgggggcagggactttgccatgtgtctatttctgtaattcccaaatgcataacagtgcagtcatttctcaataaatatattttaaataaatgaacgaattcttctgaaactcaattctgagtctgtttaaccgaattcattcaaatcgtgtgctactgtaatacccaacccgctaactttaaaagttagtttatgtctccaattgatatttagaatcaagtttaaaaatttgttctattagtattgattgatgaatgcttagtaactgcctttaactatcatttgatgttagccactgcaagtaagctttcaaatccatttgaaggaagtttgctaaagcatgagtgtccttacctgctaaatattacatctcgatgtaggttcgacctttcctgtgggaggagggaagggaggagggaaggcagacagacaggcagtatctaaactgggcaatgcctgtctttgtaattaatgagagtaacttcttccaaccagcttaattttttttttagactgcgatgatgtccttcaaacacatccttcaggtgcccaaaatggcattttcagtatcaagctacctggatccagtaagatattttctgtttattgcgatcaagagaccagtttgggaggatggcttttgatccagcaaagaatggatggatcactgaattttaaccggacctggcaagactacaagagaggtttcggcagcctgaatgacaagggggaaggagagttctggctaggcaatgactacctccacttactcactctgagaggctctgtcctcagggttgaattagaggactgggctggaaaagaggcttatgcggagtaccacttccgggtaggctctgaggcagagggctatgcactgcaggtctcctcctaccagggtaccgctggagatgctctgatggagggctctgtggaggaggggacagaatacacttcacacagcaacatgcagttcagtacctttgacagagatgcagaccaatgggaagagaactgtgccgaggtctacgggggaggctggtggtacaatagctgtcaagccgccaatctcaatggcatttactaccctgggggcacctatgaccccaggaacaacagtccctatgagatagagaacggagtgctctgggttcccttcagaggagcggattattctctgtgggccgttcggatgaaaatcagaccgctggtgggacagtagctgaaggaatggaaagtgggggctctgctttctttgcttggttagccgagaagaatgatcagaagaggaaggtgtcacggatcttgtgaactttttagaaattccctggtgctattccattgttctttgtactgtagctgaacacagctgagatgcgttactgctttgaaaaaaaataaagttttacattttttcccc

SEQ ID NO: 829 - DNA, 3628 bp, Rattus norvegicus (Norway rat)
tggggatgctagtgcctactgcgctggctgctcggctgctgagcctgttccagcaacagctgggttccctctggagtggcctggccatgctgttctgctggctgagaatagcattggggtggccagatcctggaaagggacagccacgggtccggggtgagcccaaggagactcaggagacccacgaagatccaggcagtgctcagcccacaacccccgttagtgtcaactaccacttcacgcgtcagtgcaactacaaatgtggcttctgcttccacacggccaagacatccttcgtgctgcccctggaggaggccaagcgaggactgcttctgctcaaacaggctggtatggagaagatcaacttttcaggaggagaacccttcctacaggacaggggtgaatacttgggcaagctcgtgagattctgcaaggaggagctagccctgccctctgtgagcatagtgagcaatggcagccttatccgagagagatggttcaaggactatggagactatttggacattcttgctatctcctgtgacagctttgatgagcaggttaatgttctcattggtcgtggccaagggaaaaagaaccatgtggaaaaccttcaaaagctgcggaagtggtgcagggattacaaggtggctttcaagatcaattccgtcattaatcgcttcaacgtggacgaagatatgaatgagcacatcaaggcgctgagccctgtccgctggaaggttttccaatgcctcctgattgagggtgagaactcaggagaagatgccctgagggaagcagaaagatttcttataagcaatgaagaatttgaagcattcttacagcgtcacaaagatgtgtcctgcttggtgcctgaatctaaccagaagatgaaagactcctaccttatcctggatgaatatatgcgctttttgaactgtaccggtggccggaaggacccttccaggtccatcctggatgttggcgtggaggaagcgatcaaattcagtgggtttgatgagaagatgtttctgaagcgcggggggaagtatgtatggagtaaggctgacctgaagctagactggtgaggtgagattggacggagactctaaccagctacgaggagtccacgagcagccgctcgccaccacgcacatctggctgtctacggactgttgctactgagaatgcactctatgttctttctttcagtttgactgaactaagaaaggagtaaaaccattctgtgaacccttatacagccgataagggtcctccacaggggaaggagttcagttcacagaggaacaaggtccagcgatctcaaagaactcacattttatttgtattcgaatttttgtatggatcgttactgtgaatcccatgtttccttttccctttctgttcccccatgagaaactgggttattttctgctaactatgccagttttgtcaacaggaaggatcacaaaacacaccctgcgattactgctgactgttctaatgcttttctgctttggaatctcggactttttgctcagaaatatagaatcaagaagtgtgttatagagccgtacgtgagaaccttactcttttgcaaggagcatatggaaggaggtacttctgaggacggtgtgttcatggcctcagcctctgctgctgctgctgcttcaaggatggctgttctatatcgtaccaattccttcaaggttctggacaaagccaaggtacactttacctttcatggcatggccgtgaagatggcactgacagccgcaaccaccccagcactgaggctgcctgagtctgtcaggctaaaaggttgtcccacttttctgaaaagctacaagggctcttctgcacatccagcagaatcatgacaggatgggcatggaggactcttcaggagtatgaaatgtggctgctgctccttaccatatttctcatgaaactctgaaataagacctagtagtctaggtcaccatgagaaaataatttcttctctacatcaaataagcaaaagagagaacatgaactagcccaaatcttcttcctgtggaagcattgcatgagtttattcaacctagacagcctcactgcttggaaaataattccctggaaattaaataaataccatggaaaagaaattaaactcctctgcaatcccactgtggccactagagggcaccaggaagtcagacttcattgtctcagagacttttcttcagtctttttttagaatttggtgaattttaattctgttccttatctgttttgtctttgttttttgttttggtgcctattactaaaattaatactaaacattttccaaggaactggaattttggccatttacaaaaggtcttcattctttagtgaggtcactataattcaactaagacatactctgtctcattaaaaataggtcaggttttcctgtgttttctgtcttgtttggttgtgtgtgtgtgtttacctatttttgcttgaatatagatataactatgtatcccaggctagcctggaactcatgatacctctgccttaacctccccctcttaagtgcccaggaattacccaactcctgtacagagatttttaagagaagtttgagtcacattcccccctgcagattgtgatttttttttttaagttaagtcctgtgtacatagttcacatgggaaaccatgacatcccagaggacatgggcagacacccacttggtcacacgacagagggaagctgcatgtttctttccctaattaaagtagagcatgaagaaagtatgattggaaagtgagccatcatttacatgtacccccaaccccttgtgcatgcactggcggtgggagatctctgtgcttaaaatattgaaaagtcccctttccttaaagggaaaaattacgatattttactatcgtagtacaaatcaaacttggattagatcatacattggtttgctttttcagtgttaaatktgggtgttcattttgtaaagcatacgctccctgctggggaaacaaggagtgatctagttgacatttgttaagtgtgaccagcagataccttgtgtcccatgattgatttatgcagagcagtaatactgggaagggggatttacttaagaacatcgacgggtaggacatccaacactgatttcaaagttttggcttctttattataatgtgttcggcggtaaaaaaaagtcatgggttgttttctttgaagctgaaagtctcatggtgttatttacctaaattatctgaaaaatttaaaaggggcccaggtttcattctgcgttggagtttgggggtctaattgttgcataaataaacaggcaaccaatcatcagaggttgactcctcccatcaataattcagctcgtgttttacccttttgatggactgatgttgtttcataagctattagtagtccaagaacaatcatgcaggcctcatgtgaatgtgttcagatgaggtttgatgttcgggatacatgtgcatgtatctccctgtagaatgacactgtattttgaggcattgctctagtgtatggaaacgtgatctgtgtattaaaatgttttatgcatgacctcaaaaaaaaaaaaaaaaaaaaaaaaaaaaaaaga

SEQ ID NO: 830 - DNA, 21 bp, Artificial Sequence
  Forward primer for PEG-3 Gene
gcggctcagatctttcaaagc

SEQ ID NO: 831 - DNA, 22 bp, Artificial Sequence
  Reverse primer for PEG-3 Gene
agtggtcacatcttggctgagg

SEQ ID NO: 832 - DNA, 22 bp, Artificial Sequence
  Forward Primer for GADD45 Gene
ataactgtcggcgtgtacgagg

SEQ ID NO: 833 - DNA, 21 bp, Artificial Sequence
  Reverse Primer for GADD45 Gene
atccatgtagcgactttcccg

SEQ ID NO: 834 - DNA, 22 bp, Artificial Sequence
  Forward primer for GADD153 Gene
tttcgcctttgagacagtgtcc

SEQ ID NO: 835 - DNA, 22 bp, Artificial Sequence
  Reverse primer for GADD153 Gene
tgaccactctgtttccgtttcc

SEQ ID NO: 836 - DNA, 22 bp, Artificial Sequence
  Forward primer for PC3 (BTG2) Gene
ttggcctagccaaggtaaaagg

SEQ ID NO: 837 - DNA, 21 bp, Artificial Sequence
  Reverse primer for PC3 (BTG2)Gene
atagcccaccctccaaaaacg

SEQ ID NO: 838 - DNA, 21 bp, Artificial Sequence
  Forward primer for CYP2B2 Gene
tgctcaagtacccccatgtca

SEQ ID NO: 839 - DNA, 20 bp, Artificial Sequence
  Reverse primer for CYP2B2 Gene
caaatgcgctttcctgtgga

SEQ ID NO: 840 - DNA, 20 bp, Artificial Sequence
  Forward primer for AH-Receptor Gene
ttctttccaccccaattccc

SEQ ID NO: 841 - DNA, 22 bp, Artificial Sequence
  Reverse primer for AH-Receptor Gene
ctgcatgcttctgatgtcttcg

SEQ ID NO: 842 - DNA, 20 bp, Artificial Sequence
  Forward primer for IGFBP-1 Gene
ttctttccaccccaattccc

SEQ ID NO: 843 - DNA, 22 bp, Artificial Sequence
  Reverse primer for IGFBP-1 Gene
ctgcatgcttctgatgtcttcg

SEQ ID NO: 844 - DNA, 22 bp, Artificial Sequence
  Forward primer for Amyloid-A4 Gene
acacatggccagagttgaagcc

SEQ ID NO: 845 - DNA, 22 bp, Artificial Sequence
  Reverse primer for Amyloid-A4 Gene
tcttgaatctcctcagccacgg

SEQ ID NO: 846 - DNA, 21 bp, Artificial Sequence
  Forward primer for Glutathione reductase Gene
catgatcacgtggattacggc

SEQ ID NO: 847 - DNA, 22 bp, Artificial Sequence
  Reverse primer for Glutathione reductase Gene
gaacccatcactggttatcccc

SEQ ID NO: 848 - DNA, 22 bp, Artificial Sequence
  Forward primer for Carboxyl esterase Gene
caacatgcacccagctatttca

SEQ ID NO: 849 - DNA, 22 bp, Artificial Sequence
  Reverse primer for Carboxyl esterase Gene
agtcttggtccagaactgcagc

SEQ ID NO: 850 - DNA, 22 bp, Artificial Sequence
  Forward primer for CYP3A1 Gene
ctttcctttgtcctgcattccc

SEQ ID NO: 851 - DNA, 21 bp, Artificial Sequence
  Reverse primer for CYP3A1 Gene
tcaatgctgcccttgttctcc

SEQ ID NO: 852 - DNA, 21 bp, Artificial Sequence
  Forward primer for CYP9B Gene
caacccttgatgaccgcagta

SEQ ID NO: 853 - DNA, 21 bp, Artificial Sequence
  Reverse primer for CYP9B Gene
cgccaagacaaatgtgctttc

SEQ ID NO: 854 - DNA, 22 bp, Artificial Sequence
  Forward primer for UDP-glucuronosyltransferase 2B gene
gagccgtcttctggatcgagta

SEQ ID NO: 855 - DNA, 22 bp, Artificial Sequence
  Reverse primer for UDP-glucuronosyltransferase 2B gene
ggtcccaacgctgtcttctttt

SEQ ID NO: 856 - DNA, 21 bp, Artificial Sequence
  Forward primer for EGR1 (Krox24) Gene
caaagccaagcaaaccaatgg

SEQ ID NO: 857 - DNA, 21 bp, Artificial Sequence
  Reverse primer for EGR1 (Krox24) Gene
tcacgattgcacatgtccagc

SEQ ID NO: 858 - DNA, 22 bp, Artificial Sequence
  Forward primer for GAPDH Gene
cccagaacatcatccctgcatc

SEQ ID NO: 859 - DNA, 22 bp, Artificial Sequence
  Reverse primer for GAPDH Gene
atgtaggccatgaggtccacca

SEQ ID NO: 860 - DNA, 598 bp, Rattus norvegicus
tgctcccatcctcaagtcttttcgtccgcaatggctcccaaaggcggctccaagcagcagtccgaggaggacctgctccttcaggatttcagccgcaacctgtccgccaaatcgtcggcgctgttcttcgggaatgcgttcatcgtgtctgccattcccatctggttgtactggagaatatggcatatggatcttatccagtctgctgttctgtacagcgtgatgacgttagtaagcacttacttggtagcctttgcatacaagaatgtaaaatttgttctcaagcacaaagtagcacagaagagggaagatgctgtttccaaagaagtgacccgcaaactttctgaagctgataatagaaagatgtcccggaaggagaaagatgaaagaatcctgtggaagaagaatgaagttgccgattatgaagctacaacattctccatcttctataacaacactctgttcctggttctggttattgttgcctccttctttatactgaagaacttcaaccccagagtgaactacattctgtccataagtgcttcatctggactcatcgccctcttgtctactggctccaaatagactgtgtagc

SEQ ID NO: 861 - DNA, 2023 bp, Rattus norvegicus
attcggatgcagagcatcagaggcccagctagagggacaacacagaggagtaatttgctgacagacctgcagggatggacctgctttcagctctcacactggaaacctgggtcctcctggcagtcgtcctggtgctcctctacggatttgggacccgcacacatggacttttcaagaaacaggggattcctgggcccaaacctctgcctttttttggcactgtgctgaattactatatgggtttatggaaattcgatgtggagtgccataaaaagtatggaaaaatatgggggttgtttgatggtcaaatgcctctgtttgccatcacggacacagaaatgatcaagaatgtgctagtgaaggaatgcttttctgtcttcacaaaccggcgggattttggcccagtggggattatggggaaagccatctctgtatctaaggatgaggagtggaagagatatagagccttgctgtcccccacgttcaccagtggaagactcaaggagatgttccctgtcatcgaacagtatggagacattttggtaaaatacttgaggcaagagaaaggcaaacctgtccctgtgaaagaagtgtttggtgcctacagcatggatgtgatcaccagcacatcatttggagtgaatgttgattccctcaacaacccgaaggatccttttgtggagaaagccaagaagctcttaagaattgatttttttgatccgttgttcttgtcagtagtactctttccattcctcacgccagtatatgagatgttaaacatctgcatgttcccaaaagattcaatagaatttttcaaaaaatttgtgtacagaatgaaggaaacccgcctggattctgtgcagaagcatcgagtggattttcttcagctgatgatgaatgctcataatgattctaaagacaaagaatctcatacagccctatccgatatggagatcacagcccagtcaatcatttttatttttgctggatatgaacccaccagcagcacactttcctttgtcctgcattccctggccactcacccagatacacagaagaaactgcaggaggagatcgacagggctctgcccaataaggcacctcccacctatgatactgtgatggaaatggaatacctggatatggtgttgaatgaaaccctcagattgtatccaattggtaatagacttgagagagtctgtaaaaaagatgttgaaatcaatggtgtgtttatgcccaaagggtcagtggtcatgattccatcttatgctcttcaccgtgatccacagcactggccagagcctgaggaatttcgcccagaaaggttcagcaaggagaacaagggcagcattgatccttatgtatatctgccctttggaaatggacccaggaactgcattggcatgaggtttgctctcatgaatatgaaactcgctctcactaaagttctgcaaaacttctccttccagccttgtaaggaaacacagatacctctgaaattaagcagacaaggacttcttcaaccaacaaaacccattattctaaaggttgtgccacgggatgaaatcataactggatcatgattttccctcaaggagttctgctgaattcttcagaaatgtggtgtctaagaacaccagaccctttaatttatgtcatgaataaaattcagatgaaattagggcttaatcgactttgttttgattcggtacatctttgctctttctcagtgtctacaatgtacccatctaatataaaggaaatgacaagtcagtgacagaacaggaacttaacctttggtgattctcatgggactacctccatccacatctggttgtctctgttaatttcttttgatagtaaccttgtctctgtaatttgatcaagaatttttcatgaaaatgtgaactattgtgacaactttaattgtagatttggtatcagatgttttagatgcattattctacactaaatgttacatggaaaaaatgtgaataaacacttctttaaaaatccccatttt

SEQ ID NO: 862 - DNA, 895 bp, Rattus norvegicus
gttcataattaccctgtgctaaacaagactgtttcactgtctttcctgtcactcaactctcctctgccaccacctgaaacaaaacacttgagtgggaagtatacatgatttattttaagttgcttgtgagacttttccctaaaacaacaaatgttgttaagtcatcaaattgcctcctctttaatcttagttgtatacattgtcccttcagctataaggagaatgccatgagattatccagaatccaccatgatcagccagtgaagcccctggaccgagccgtcttctggatcgagtatgtcatgcgtcacaaaggagccaagcacctccgctcaactctgcatgaccttagctggttccagtaccactctctggatgtcattgggttcctattgctctgtgtggtaggtgtggtattcatcatcacaaaattctgcctcttttgttgccgtaagactgctaacatgggaaagaagaagaaagagtagcatcataaaggctgaagcagagccctgagagatgagcctctgccagctgcttccagcaggaacctgttgtcatgccagtgccttccctctaaaagaagacagcgttgggacctcattgaacatggctccaatgaattcactatgttctgaagacatgcaagatttcatgccaaatatatattcagtgctaaaaaaacaaaatcctgtgttcagtttagaatgttttgatgtagctgagaagctttgcccaacaacaataactgaagctactgtagttcataaagttcacatggctttatagcctttgcaaaacatatctataaatcaattactttttgaaaatacccagcctgctttgtcttcatttagtagactatttttctctccttctttcttttttcttcttt

What is claimed is:

1. A method of predicting at least one toxic effect of a compound, comprising detecting the level of expression of one or more genes from Table 3 in a tissue or cell sample exposed to the compound; wherein differential expression of the one or more genes from Table 3 is indicative of at least one toxic effect.

2. The method according to claim 1, wherein the toxic effect is hepatotoxicity.

3. The method according to claim 1, wherein the hepatotoxicity comprises at least one liver disease pathology selected from the group consisting of hepatitis, liver necrosis, protein adduct formation and fatty liver.

4. The method according to claim 1, wherein the expression levels of at least 2 genes from Table 3 are detected.

5. The method according to claim 1, wherein the expression levels of at least 5 genes from Table 3 are detected.

6. The method according to claim 1, wherein the expression levels of at least 10 genes from Table 3 are detected.

7. The method according to claim 1, wherein the expression levels of nearly all genes from Table 3 are detected.

8. The method according to claim 1, wherein the expression levels of all genes from Table 3 are detected.

9. The method according to claim 1, wherein the level of expression is detected by an amplification, hybridization or reporter gene assay.

10. A method of predicting at least one toxic effect of a compound, comprising:
(a) detecting the level of expression of one or more genes from Table 3 in a tissue or cell sample exposed to the compound;
(b) comparing the level of expression of the one or more genes to their level of expression in a control tissue or cell sample, wherein differential expression of the one or more genes in Table 3 is indicative of at least one toxic effect.

11. The method according to claim 10, wherein the toxic effect is hepatotoxicity.

12. The method according to claim 10, wherein the hepatotoxicity comprises at least one liver disease pathology selected from the group consisting of hepatitis, liver necrosis, protein adduct formation and fatty liver.

13. The method according to claim 10, wherein the expression levels of at least 2 genes from Table 3 are detected.

14. The method according to claim 10, wherein the expression levels of at least 5 genes from Table 3 are detected.

15. The method according to claim 10, wherein the expression levels of at least 10 genes from Table 3 are detected.

16. The method according to claim 10, wherein the expression levels of nearly all genes from Table 3 are detected.

17. The method according to claim 10, wherein the expression levels of all genes from Table 3 are detected.

18. The method according to claim 10, wherein the level of expression is detected by an amplification, hybridization or reporter gene assay.

19. A method of predicting the progression of a toxic effect of a compound, comprising detecting the level of expression in a tissue or cell sample exposed to the compound of one or more genes from Table 3, wherein differential expression of the one or more genes in Table 3 is indicative of toxicity progression.

20. The method according to claim 19, wherein the toxic effect is hepatotoxicity.

21. The method according to claim 19, wherein the hepatotoxicity comprises at least one liver disease pathology selected from the group consisting of hepatitis, liver necrosis, protein adduct formation and fatty liver.

22. The method according to claim 19, wherein the expression levels of at least 2 genes from Table 3 are detected.

23. The method according to claim 19, wherein the expression levels of at least 5 genes from Table 3 are detected.

24. The method according to claim 19, wherein the expression levels of at least 10 genes from Table 3 are detected.

25. The method according to claim 19, wherein the expression levels of nearly all genes from Table 3 are detected.

26. The method according to claim 19, wherein the expression levels of all genes from Table 3 are detected.

27. The method according to claim 19, wherein the level of expression is detected by an amplification, hybridization or reporter gene assay.

28. A method of predicting the mechanism of toxicity of a compound comprising detecting the level of expression in a tissue or cell sample exposed to the compound of one or more genes from Table 3, wherein differential expression of the one or more genes in Table 3 is associated with a specific mechanism of toxicity.

29. The method according to claim 28, wherein the expression levels of at least 2 genes from Table 3 are detected.

30. The method according to claim 28, wherein the expression levels of at least 5 genes from Table 3 are detected.

31. The method according to claim 28, wherein the expression levels of at least 10 genes from Table 3 are detected.

32. The method according to claim 28, wherein the expression levels of nearly all genes from Table 3 are detected.

33. The method according to claim 28, wherein the expression levels of all genes from Table 3 are detected.

34. The method according to claim 28, wherein the level of expression is detected by an amplification, hybridization or reporter gene assay.

35. A method of predicting at least one toxic effect of a compound, comprising detecting the level of expression of one of the genes selected from Table 4 in a tissue or cell sample exposed to the compound, wherein differential expression of the gene selected from Table 4 is indicative of at least one toxic effect.

36. The method according to claim 35, wherein the gene selected from Table 4 is progression elevated gene 3 or Translocon associated protein.

37. The method according to claim 35, wherein the toxic effect is hepatotoxicity.

38. The method according to claim 35, wherein the level of expression is detected by an amplification, hybridization or reporter gene assay.

39. A set of nucleic acid primers, wherein the primers specifically amplify at least two of the genes from Table 3.

40. A set of nucleic acid probes, wherein the probes comprise sequences which hybridize to at least two of the genes from Table 3.

41. A set of nucleic acid probes, wherein the probes comprise sequences which hybridize to at least 5 of the genes from Table 3.

42. A set of nucleic acid probes, wherein the probes comprise sequences which hybridize to at least 10 of the genes from Table 3.

43. The set of probes according to claim 40, wherein the probes are attached to a solid support.

44. A solid support comprising at least two probes, wherein each of the probes comprises a sequence that specifically hybridizes to a gene in Table 3.

45. A computer system comprising a database containing DNA sequence information and expression information of at least two of the genes from Table 3 from tissue or cells exposed to a hepatotoxin, and a user interface.

46. A computer system for predicting at least one toxic effect of a compound comprising:
a processor and a memory coupled to said processor;
said memory storing a first set of data including the level of expression of one or more genes from Table 3 in a tissue or cell sample exposed to said compound, and said memory storing a second set of data including the level of expression of the one or more genes from Table 3 in a control tissue or cell sample; and
said processor comparing said first set of data with said second set of data to predict said at least one toxic effect of said compound.

47. A kit comprising at least one solid support according to claim 44 and gene expression information for the said genes.
